(19) United States
(12) Patent Application Publication
(10) Pub. No.: US 2026/0049291 A1
(43) Pub. Date: Feb. 19, 2026

(54) CHIMERIC POXVIRUSES

(71) Applicant: Transgene, Illkirch Graffenstaden (FR)

(72) Inventors: Philippe ERBS, Illkirch Graffenstaden (FR); Annie FINDELI, Illkirch Graffenstaden (FR)

(73) Assignee: Transgene, Illkirch Graffenstaden (FR)

(21) Appl. No.: 19/102,438

(22) PCT Filed: Aug. 18, 2023
(86) PCT No.: PCT/EP2023/072773

§ 371 Date: Feb. 10, 2025

(30) Foreign Application Priority Data
Aug. 18, 2022 (EP) 22306234.0

(51) Int. Cl. C12N 7/00; A61K 35/768; A61P 35/00

(52) U.S. Cl. CPC C12N 7/00; A61K 35/768; A61P 35/00; C12N 2710/24021; C12N 2710/24033; C12N 2710/24052

(57) ABSTRACT

The present invention relates to a chimeric poxvirus with improved anticancer activity (higher cancer cell killing capacities and better tumor selectivity), as well as variant version thereof with one or more altered viral genes, recombinant versions thereof comprise one or more nucleic acid(s) of interest and recombinant variant versions thereof, all of which may be included in a composition and used for the treatment of a disease, in particular proliferative disease, notably cancers.

### TECHNICAL FIELD OF THE INVENTION

[0001] The present invention is in the field of oncolytic viruses and provides new chimeric poxviruses particularly useful for treating proliferative diseases like, but not limited to, cancers. More precisely, the invention provides chimeric poxviruses which are obtained by the pooling of different strains of parental poxviruses and the selection of more potent chimeric viruses by cellular passages. These chimeric poxviruses present many improved characteristics compared to their parental Vaccinia virus strain Copenhagen (COP) which is known in the art as being a particularly effective oncolytic viral vector, and more specifically compared to their parental poxviruses.

[0002] The chimeric poxviruses according to the invention may be modified by altering the thymidine kinase-encoding gene (locus J2R) and/or the ribonucleotide reductase-encoding gene (locus|4L and/or F4L), forming variant chimeric poxviruses.

[0003] The chimeric poxviruses according to the invention may further encode for one or more heterologous transgene(s), forming recombinant chimeric poxviruses. Said recombinant chimeric poxviruses also express higher rates of transgenes compared to their parental poxviruses.

[0004] The present invention also deals with methods for obtaining chimeric poxviruses.

[0005] The chimeric poxviruses of the invention may be used for treatment of proliferative diseases, like cancers.

### BACKGROUND ART

[0006] Oncolytic viruses are a class of therapeutic agents that have the unique property of tumor-dependent self-perpetuation (Hermiston et al., 2006, Curr. Opin. Mol. Ther., 8 (4): 322-30). The benefit of using these viruses is that as they replicate, they lyse their host cells. Oncolytic viruses are capable of selective replication in dividing cells (mainly cancer cells) while leaving non-dividing cells (e.g.: healthy cells or primary cells) unharmed. As the infected dividing cells are destroyed by lysis, they release new infectious particles to infect the surrounding dividing cells. Due to its potential to be more effective and less toxic than current therapies due to the viruses' selective growth and amplification in tumor cells, oncolytic virus therapy has been recognized as a promising therapeutic approach for cancer treatment. Cancer cells are ideal hosts for many viruses because they have the antiviral interferon pathway inactivated or have mutated tumor suppressor genes that enable viral replication to proceed unhindered (Chernajovsky et al., 2006, BMJ, 332 (7534): 170-2). Several viruses including adenovirus, herpes simplex virus, reovirus, poxvirus, Newcastle disease virus, measles virus, Vesicular Stomatitis Virus, Seneca Valley Virus and the hemagglutinating virus of Japan Envelope have been clinically tested as oncolytic agents.

[0007] Among them, oncolytic poxviruses demonstrated encouraging results in multiple pre-clinical tumor models and some clinical trials for the treatment of various cancers. Six poxviruses from four genera have been investigated as potential oncolytic viruses: Vaccinia virus, Raccoonpox virus and Cowpoxvirus (Orthopoxviruses), Myxoma virus (Leporipoxvirus), Yaba monkey tumor virus (Yatapoxvirus) and Squirrelpox virus (Torres-Domingez et al., 2019, Review Expert Opin Biol Ther.; 19 (6): 561-573). Poxviruses represent about 13% of the total number of clinical studies evaluating oncolytic viruses from 2000 and 2020 (Macedo et al., 2020, Journal for ImmunoTherapy of Cancer; 8). Among them, recombinant oncolytic Vaccinia viruses (VACV) are promising vectors for tumor therapy. The genome organization, lysis capacity and wide tumor tropism of VACV make it an ideal oncolytic agent for cancer treatment and the most used poxvirus vector for cancer therapy (Haddad et al., 2017, Front Oncol., 7, 96. doi: 10.3389/fonc.2017.00096). It targets tumors selectively after systemic administration and thus displays natural tumor tropism (McFadden, 2005, Nat Rev Microbiol., 3, 201-213). Several strains of VACV are currently evaluated in preclinical and clinical trials including Wyeth, Western Reserve, Copenhagen and Lister strains (Heo et al., 2013 Nat Med., 19, 329-336. doi: 10.1038/nm.3089, Zeh et al., 2015, Mol Ther., 23, 202-214. doi: 10.1038/mt.2014.194, Foloppe et al., 2008, Gene Ther., 15, 1361-1371. doi: 10.1038/gt.2008.82, Mell et al., 2017, Clin Cancer Res., 23, 5696-5702. doi: 10.1158/1078-0432.CCR-16-3232). However, neither rabbitpox viruses nor cowpox viruses have been evaluated in clinical studies, for different reasons. Rabbitpox viruses are too virulent to be used as oncolytic viruses for treating human cancers, which may be explained by the presence of three specific virulence genes, encoding a zinc RING finger protein, an ankyrin repeat family protein and a chemokine-binding protein (Li et al., 2005, Journal of General Virology, 86, 2969-2977). Cowpox viruses, despite interesting results in vitro (Ricordel et al. 2017, Mol. Ther. Oncolytics Vol. 7), have a too weak oncolytic power in vivo to represent a potential oncolytic virus platform.

[0008] Modifications of the naturally occurring viruses have already been practiced in order to enhance the ability of poxviruses, and more particularly of vaccinia viruses, to infect and lyse 100% of the tumor cells, which is difficult to achieve in in vivo context. For this purpose, many strategies are currently used to modify the viruses (e.g.: tropism modification to redirect virus to the cancer cell surface). Oncolytic vaccinia viruses are often “armed” with enzyme-prodrug systems that enhance the oncolytic efficacy of the virus therapy by exerting a strong bystander effect and thus permit elimination of neighboring uninfected tumor cells. For example, armament with the so-called FCU1 suicide gene, encoding a bifunctional chimeric polypeptide that combines the enzymatic activities of FCY1 and FUR1, efficiently catalyzed the direct conversion of 5-fluorocytosine (5-FC), a nontoxic antifungal agent, into the toxic metabolites 5-fluorouracil (5-FU) and 5-fluorouridine-5′monophosphate (5-FUMP), thus bypassing the natural resistance of certain human tumor cells to 5-fluorouracil (Erbs et al., 2000, Cancer Res., 60 (14): 3813-22). Foloppe et al. showed that a VACV expressing the FCU1 gene has potent anti-tumor effect both in vitro and in vivo in a murine model of a human colon tumor (Foloppe et al., 2008, Gene Ther., 15:1361-1371). The vaccinia viruses expressing the FCU1 fusion suicide gene, combined with the administration of the 5-fluorocytosine (5-FC) prodrug, displayed a highly potent anti-tumor effect both in vitro and in vivo. The potential of FCU1 delivered by an oncolytic cowpox virus as therapeutic agent was also explored (Ricordel et al., 2017, Molecular Therapy-Oncolytics, 7:1-11). The cowpox viruses expressing the FCU1 fusion suicide gene, combined with the administration of the prodrug, also displayed an anti-tumor effect in vitro.

[0009] Viral modifications can also be used to increase safety. In this regard, thymidine kinase (TK) deleted poxvirus was shown to have decreased pathogenicity compared with wild-type poxvirus, but replication in tumor cells was preserved (Buller et al., 1985, Nature, 317 (6040): 813-5). Attenuated poxviruses, and in particular vaccinia virus strains, have thus been developed for therapeutic and diagnostic applications and are being evaluated in clinical studies. However, methods of attenuating vaccinia viruses lead to a decrease of their efficacy. In a therapeutic point of view, this decrease of efficacy can result into a diminution of overall response, a diminution of patient's survival, an increase of mortality, pathology resistances . . . As a result, the first oncolytic vaccinia viruses tested in clinical trials have been highly safe in patients but have generally fallen short of their expected therapeutic value as monotherapies. Moreover, some tumor cells appeared to be poorly permissive or resistant to infection and replication of oncolytic poxviruses, meaning that some cancers are still refractory or resistant to oncolytic poxvirus-based therapy (e.g. National Clinical Trial NCT01380600: safety but no efficacy of Pexa-Vec (pexastimogene devacirepvec, JX-594, an oncolytic and immunotherapeutic vaccinia Wyeth (WY) based virus engineered to express GM-CSF) in colorectal carcinoma patients who are refractory to, or intolerant to, oxaliplatin, irinotecan, and Erbitux treatments; National Clinical Trial NCT01387555: no efficacy of Pexa-Vec in patients suffering from advanced liver cancer who failed sorafenib; National Clinical Trial NCT01636284: no efficacy of Pexa-Vec in sorafenib-naïve advanced liver cancer patients).

[0010] Another way to obtain evolved viruses is the generation of new oncolytic chimeric viruses via a directed evolution method, a method used to mimic and accelerate the process of natural selection.

[0011] Viruses undergo genetic changes by several mechanisms, including point mutation and recombination. Recombination is a widespread phenomenon in viruses and can have a major impact on their evolution. Recombination occurs when at least two viral homologous sequences co-infect the same host cells and exchange genetic fragments. Homologous recombination (HR) occurs in the same site in both parental strands and creates new genetic combinations that may change the phenotype of the chimeric viruses. Homologous recombination is the basis for many widely used genetic techniques in virus research, including construction of recombinant vectors (Hruby, 1990, Clin. Microbiol. Rev, 3 (2) 153-170). In 1958, experimentations showed that different strains of poxviruses could recombine (Fenner and Comben. 1958, Virology, 5, 530-548). Some characteristics of the obtained chimeras were studied (e.g.: virus replication, heat resistance or hemagglutinin production), but no oncolytic power or therapeutic index were explored. Paszkowski et al. have studied the mechanism of poxvirus genetic recombination (Paszkowski et al., 2016, PLOS Pathogens, 12 (8) e1005824). They observed multiple genetic exchanges even after one round of selection, showing that homologous intramolecular and intermolecular recombination occurred efficiently; however, no functional characteristics were studied.

[0012] The directed evolution methodology is usually employed for the creation of gene libraries (Koerber et al., 2006, Nat. Protocols 1 (2) p.701-706). This methodology applied to oncolytic virotherapy has a different purpose. It was recently used for obtaining oncolytic chimeric poxviruses, CF33 and CF17, by the pooling of nine strains of poxviruses known to be oncolytic on non-resistant tumor cells (WO2018/031694, O'Leary et al., 2018, Mol. Therap. Vol 9:13-21, Chaurasiya et al., 2020, Cancer Gene Therapy 27:125-135, Hammad et al., 2020, Mol. Ther. Oncolytics, vol. 19 p. 278-282). The mix of viruses was grown and shuffled on a non-tumor cell line (African green monkey kidney fibroblasts CV-1), a cell line usually used in the research field for poxvirus production, due to its high permissiveness to poxviruses replication. However, in infected HCT116 colorectal cancer cell line, the generated chimeric CF33 virus secreted less extra cellular enveloped viruses (EEV) at early stages than IHD parental strain, reflecting a lower spreading capacity of the CF33 virus in tumor cells, compared to at least one of the parental strains. Moreover, the overall viral titer of CF33 in the HCT116 cell lysates was found to be similar to the one obtained with parental Western Reserve (WR) and Elstree strains 72 h post-infection, showing that CF33 virus did not replicate more than at least two parental viruses. Moreover, O'Leary et al. does not provide any data on the effect of the chimera on healthy cells (preferably primary cells). The tumoral specificity of the chimeras is thus unknown and cannot be compared to the tumoral specificity of the parental strains.

[0013] DeVV5, an oncolytic chimeric vaccinia virus, was also generated by a directed evolution method (WO2020011754, Ricordel et al., 2018 Cancers, July 10; 10 (7): 231). Four different vaccinia virus strains (Modified Vaccinia Virus Ankara (MVA), Copenhagen (COP), Wyeth (WY) and Western Reserve (WR)) were pooled in resistant cancer cell lines, amplified, and selected through successive passages under stringent conditions. However, even if the selected chimeric vaccinia virus deVV5 showed enhanced oncolytic properties and tumor selectivity compared to its parental viruses in vitro, but no results were shown in vivo.

[0014] Combination therapies with standards and emerging anticancer therapies (chemotherapy, immune-checkpoint inhibitors (ICI), etc.) are also used to improve the oncolytic potency of oncolytic poxviruses (Filley et al., 2017, Front Oncol. 7, 106. doi: 10.3389/fonc.2017.00106). For example, Pexa-Vec was evaluated in a randomized controlled Phase 3 trial in advanced first line hepatocarcinoma (HCC) comparing the administration of Pexa-Vec and sorafenib to sorafenib alone (National Clinical Trial NCT02562755). TG6002 (Heinrich et al., 2017, Onco Targets Ther., 10, 2389-2401. doi: 10.2147/OTT.S126320), which is a derivative of a Copenhagen (COP) based TK-deleted VACV expressing the FCU1 fusion suicide gene and given in combination with 5-FC, entered clinical development in recurrent glioblastoma patients (National Clinical Trial NCT03294486). BT-001 (Vaccinia Virus encoding GM-CSF and aCTLA4) is tested in a phase I/IIa study, combined with Pembrolizumab (a-PD1) in patients with cutaneous or subcutaneous lesions or easily injectable lymph nodes of metastatic/advanced solid tumors (National Clinical Trial NCT04725331). The trial evaluating the combination of Pexa-Vec with Nivolumab for the treatment of HCC in patients naive to sorafenib was prematurely terminated, due to the failure of Pexa-Vec and nivolumab in their respective pivotal trials (National Clinical Trial NCT03071094).

### Technical Problem and Proposed Solution

[0015] Despite the different current approaches tested, like viral modifications, viral armaments, chimeras' generation or combinations with standards or emerging therapies, the known poxvirus platforms do not have a sufficient oncolytic power to provide satisfying therapeutic results for the treatment of cancers. Moreover, poxviruses are not capable of infecting and replicating in all tumor cells, which means that some cancers are refractory or resistant to therapies based on oncolytic poxviruses. Furthermore, oncolytic poxviruses can be limited in their intratumoral spread because of physical barriers within the tumor microenvironment; neutralizing antibodies can also impede the poxviruses' systemic delivery.

[0016] As a result, there is still a need for highly potent oncolytic poxviruses, with improved abilities to infect and lyse many tumor cells without increasing the injection dose, to avoid toxic events. The use of these poxviruses with better anti-cancer efficacy will result in better cancer cell killing capacities compared to the currently developed oncolytic viruses, whether they are administrated in monotherapy or combined with other anticancer therapies. The use of these poxviruses will also result in an increased oncolytic effect on cells poorly permissive or resistant to current therapies with existing oncolytic viruses, oncolytic poxviruses or oncolytic vaccinia viruses.

[0017] Moreover, there is a need of safe oncolytic viruses: the poxviruses should have improved tumor selectivity to be of safe use for treated subjects, but with no or no significant impact on the virus' cancer cell killing capacities.

[0018] There is also a need of oncolytic poxviruses being less neutralized by the host immune system, to avoid the reduction of their effects because of rapid systemic elimination.

[0019] In the context of the invention, the inventors showed that it was possible to create and select new chimeric poxviruses and recombinant versions thereof, which importantly and surprisingly achieved better anticancer therapy, with an increased oncolytic power, an increased extracellular-enveloped virus (EEV)-secretion capacity, and a better spreading capacity, resulting in higher cancer cell killing capacities, a better antitumor efficacy both in injected tumors (tumors into which the viruses are directly injected) and non-injected tumors (tumors in which viruses are not injected, said viruses being administered through another route, for example intravenous, subcutaneous, etc.) and increased survival of subjects receiving the chimeric poxviruses. In the situation where these chimeric poxviruses carry a transgene encoding a protein of interest, their metabolism, and more particularly their rapid replication and their ability to infect a high number of cells, due to the chimeras' increased capacity to produce EEV, lead to an increased ability to produce proteins of interest. By inducing also, the syncytia formation, chimeric poxviruses according to the invention enhance virus yield, the said spreading and cytopathic effect, as well as antitumor immunity. Chimeric poxviruses according to the invention also replicate less in healthy cells (preferably primary cells), having thus a better tumor selectivity and safety profile. Having both a better oncolytic power and a better safety profile, said chimeric poxviruses have an increased therapeutic index. They are also less neutralized by anti-vaccinia virus antibodies, thus allowing their use in subjects carrying such antibodies (e.g.: subjects vaccinated with vaccinia viruses and therefore having been induced an adaptive immune response) and more resistant to complement-mediated virus neutralization (e.g. induced by the innate immune system).

[0020] The chimeric poxviruses according to the invention were generated via a directed evolution method. The starting pool consisted in a mix of sixteen different poxvirus strains: Rabbitpox virus strain Utrecht (RPX), Cowpox virus strain Brighton (CPX), Vaccinia virus strain Copenhagen (COP), Vaccinia virus strain Western Reserve (WR), Vaccinia virus strain Wyeth (WY), Modified Vaccinia virus strain Ankara (MVA), Raccoonpox virus strain Herman (RCN), ORF virus strain NZ2 (ORF), Pseudocowpox virus strain TJS (PCP), Bovine Papular stomatitis virus strain Illinois 721 (BPS), Myxoma virus strain Lausanne (MYX), Squirrelpox virus strain Kilham (SQF), Fowlpox virus strain FP9 (FPV), Swinepox virus strain Kasza (SPV), Yaba-like disease virus strain Davis (YLD) and Cotia virus strain SP An 232 (CTV).

[0021] Most of these parental poxvirus strains are known to be oncolytic to varying degrees of intensity, but it is not the case of MVA, FPV and SPV, which are known not to replicate efficiently in mammalian cells and are therefore not oncolytic (Ricordel et al., 2018, Oncotarget vol 9, 35891-35906; Guse et al., 2011, Expert Opinion Biol. Ther.11 (5): 595-608). MVA and FPV are instead known for their high safety profile in humans, which is why they have been included in the starting mix of poxvirus strains.

[0022] After exposure of this mix to a directed evolution method, the inventors selected a chimeric poxvirus, named POXSTG19503 (thereafter referred as “wild-type chimeric poxvirus according to the invention”), with enhanced oncolytic properties and therapeutic index in vitro and better spreading capacity in vivo due to improved syncytia formation and EEV-secretion capacities, compared to its parental strains, and unexpectedly higher EEV-secretion capacity compared to the Vaccinia virus strain IHD-J and rabbitpox virus known as high EEV producer strains of poxvirus. Even more, the inventors selected the said chimeric poxvirus, named POXSTG19503, which induces a superior specific T cell response against tumor.

[0023] More precisely, POXSTG19503 is a chimeric orthopoxvirus because it comprises nucleic acid fragments originating only from orthopoxviruses: Rabbitpox virus strain Utrecht (RPX), Cowpox virus strain Brighton (CPX), Vaccinia virus strain Copenhagen (COP), Vaccinia virus strain Wyeth (WY), Vaccinia virus strain Western Reserve (WR) and Modified Vaccinia virus strain Ankara (MVA). Unexpectedly, the enhanced oncolytic activity was present even though a significant proportion of the genome of the chimeric poxvirus was derived from MVA. Importantly, contrary to deVV5, POXSTG19503 showed enhanced anticancer efficiency in vivo.

[0024] The inventors also showed that it was possible to delete one or more genes of the chimeric poxviruses without altering its ability to destroy cancer cells, to secrete a high percentage of EEV particles or to induce syncytia formation. This/these deletion(s) (genes encoding TK and/or RR) further improved the viruses' safety, and modified viruses still had stronger oncolytic properties than their parental correspondingly deleted strains.

[0025] The inventors also explored the feasibility of the recombination approach using said chimeric poxviruses as viral vectors, and thus constructed armed oncolytic chimeric poxviruses encoding FCU1 or interleukin (IL-12). It appeared that the insertion of said transgenes in the chimeric poxviruses did not alter their anticancer activities. Moreover, it appeared that, due to their metabolism, and more particularly to their rapid replication and their ability to infect a high number of cells due to the chimeras' increased capacity to produce EEV and to induce syncytia formation, said recombinant chimeric poxviruses expressed higher rates of transgenes than their parental vaccinia virus strain Copenhagen expressing the same transgenes.

[0026] Based on these results, one may anticipate that the chimeric poxviruses of the invention may be successfully used as a therapeutical solution, especially for treatment of proliferative diseases, and for replacing the existing oncolytic viruses. They have a better efficiency profile in vivo, while remaining safe for use. The chimeric poxviruses of the invention may also be advantageous for treating cancers refractory or resistant to poxvirus-based therapy. The chimeras of the invention can also be exploited in combination with additional anticancer therapy/ies.

[0027] Other and further aspects, features and advantages of the present invention will be apparent from the following description of the presently preferred embodiments of the invention. These embodiments are given for the purpose of disclosure.

### SUMMARY OF THE INVENTION

[0028] In a first aspect, the invention provides a chimeric poxvirus (optionally variant and/or recombinant), wherein said chimeric poxvirus comprises a nucleic acid sequence having a sequence identity of at least 96,6%, preferably at least 96,7%, at least 96,8%, at least 96,9%, at least 97%, at least 97,1%, at least 97,2%, at least 97,3%, at least 97,4%, at least 97,5%, at least 97,6%, at least 97,7%, at least 97,8%, at least 97,9%, at least 98%, at least 98,1%, at least 98,2%, at least 98,3%, at least 98,4%, at least 98,5%, at least 98,6%, at least 98,7%, at least 98,8%, at least 98,9%, at least 99%, at least 99,1%, at least 99,2%, at least 99,3%, at least 99,4%, at least 99,5%, at least 99,6%, at least 99,7%, at least 99,8%, at least 99,9%, at least 99,91%, at least 99,92%, at least 99,93%, at least 99,94%, at least 99,95%, at least 99,96%, at least 99,97%, at least 99,98%, at least 99,99%, or even 100% of identity with SEQ ID NO:1.

[0029] In one embodiment, the chimeric poxvirus of the invention is the chimeric poxvirus POXSTG19503 clone 7 deposited at the Collection Nationale de Cultures de Microorganismes (CNCM) on 20 Oct. 2022 under Accession Number CNCM I-5913.

[0030] In the present disclosure, the chimeric poxvirus deposited under Accession Number CNCM I-5913 is also referred as POXSTG19503.

[0031] In a preferred embodiment, the chimeric poxvirus (optionally variant and/or recombinant) of the invention comprises nucleic acid fragments from Rabbitpox virus strain Utrecht (RPX), Cowpox virus strain Brighton (CPX), Vaccinia virus strain Copenhagen (COP), Vaccinia virus strain Wyeth (WY), Vaccinia virus strain Western Reserve (WR) and Modified Vaccinia virus strain Ankara (MVA). In a specific embodiment, said chimeric poxvirus (optionally variant and/or recombinant) may comprise a glutamic acid in position 151 of the protein encoded by the A34R gene, or a valine in position 19 of the protein encoded by the A34R gene, or both. In a further specific embodiment, said chimeric virus (optionally variant and/or recombinant) may be partially or totally defective in the A56R locus, in particular may comprise the A56R gene from Rabbitpox virus, preferably from the parental Rabbitpox virus strain Utrecht (RPX). The invention also provides derivatives of any chimeric poxvirus, including recombinant derivatives (i.e.: further comprising one or more heterologous nucleic acid(s) of interest), variant derivatives defective in one or more loci, notably defective in the J2R locus (in particular derivatives in which the J2R locus has been deleted) or deficient in the J2R locus and in the 14L and/or F4L locus (in particular derivatives in which the J2R locus and the 14L and/or F4L locus has been deleted), and recombinant variant derivatives defective in one or more loci as indicated above and further comprising one or more heterologous nucleic acid(s) of interest. A recombinant (optionally variant) chimeric poxvirus according to the invention may encode one or more polypeptide(s) of therapeutic interest, which are preferably selected from polypeptides capable of reinforcing the oncolytic nature of the chimeric poxvirus, polypeptides capable of potentiating anti-tumor efficacy, antigens for inducing or activating an immune humoral and/or cellular response, and permease. In a preferred embodiment, the recombinant chimeric poxvirus according to the invention may encode an interleukin. More preferably, said interleukin is an IL-12.

[0032] In a second aspect, the invention provides a chimeric poxvirus (optionally variant and/or recombinant), wherein, for at least one tumor, the oncolytic power of said chimeric poxvirus (optionally variant and/or recombinant) is higher than the oncolytic power measured in the same conditions and at the same time post-infection of at least one of the oncolytic parental poxvirus strains (optionally variant and/or recombinant) Rabbitpox virus strain Utrecht (RPX), Cowpox virus strain Brighton (CPX), Vaccinia virus strain Copenhagen (COP), Vaccinia virus strain Wyeth (WY) and

[0033] Vaccinia virus strain Western Reserve (WR), wherein for a given tumor, a given virus, given conditions and a given time post-infection, an oncolytic power OP(tumor, virus, conditions, time post-infection) is defined as:

$$OP ( tumor , virus , conditions , time post - infection ) = ( 100 - percentage of surviving tumor cells after infection by virus ) .$$

[0034] In a preferred embodiment, for at least one tumor, the oncolytic power of said chimeric poxvirus (optionally variant and/or recombinant) is higher than the oncolytic power measured in the same conditions and at the same time post-infection of the parental Vaccinia virus strain Copenhagen (COP) (optionally variant and/or recombinant) or the parental Rabbitpox virus strain Utrecht (RPX) (optionally variant and/or recombinant), two particularly oncolytic poxvirus strains. More preferably, for at least one tumor, the oncolytic power of said chimeric poxvirus (optionally variant and/or recombinant) is higher than the oncolytic power measured in the same conditions and at the same time post-infection of at least two of the oncolytic parental poxvirus strains (optionally variant and/or recombinant) Rabbitpox virus strain Utrecht (RPX), Cowpox virus strain Brighton (CPX), Vaccinia virus strain Copenhagen (COP), Vaccinia virus strain Wyeth (WY) and Vaccinia virus strain Western Reserve (WR). For instance, for at least one tumor, the oncolytic power of said chimeric poxvirus (optionally variant and/or recombinant) is higher than the oncolytic powers measured in the same conditions and at the same time post-infection of the parental Vaccinia virus strain Copenhagen (COP) (optionally variant and/or recombinant) and the parental Rabbitpox virus strain Utrecht (RPX) (optionally variant and/or recombinant). In a more preferred embodiment, for at least one tumor, the oncolytic power of said chimeric poxvirus (optionally variant and/or recombinant) is higher than the oncolytic power measured in the same conditions and at the same time post-infection of at least three, more preferably higher than at least four, and even more preferably higher than each of the five oncolytic parental poxvirus strains (optionally variant and/or recombinant) Rabbitpox virus strain Utrecht (RPX), Cowpox virus strain Brighton (CPX), Vaccinia virus strain Copenhagen (COP), Vaccinia virus strain Wyeth (WY) and Vaccinia virus strain Western Reserve (WR).

[0035] In a third aspect, the invention provides a chimeric poxvirus (optionally variant and/or recombinant), wherein for at least one healthy cell (preferably primary cell), the viral replication in the healthy cell of said chimeric poxvirus (optionally variant and/or recombinant) is lower than that of at least one of the five oncolytic parental poxvirus strains (optionally variant and/or recombinant) Rabbitpox virus strain Utrecht (RPX), Cowpox virus strain Brighton (CPX), Vaccinia virus strain Copenhagen (COP), Vaccinia virus strain Wyeth (WY) and Vaccinia virus strain Western Reserve (WR).

[0036] Preferably, for at least one healthy cell (preferably primary cell), the viral replication in the healthy cell of said chimeric poxvirus (optionally variant and/or recombinant) is lower than that of the parental Vaccinia virus strain Copenhagen (COP) (optionally variant and/or recombinant). More preferably, for at least one healthy cell (preferably primary cell), the viral replication in the healthy cell (preferably primary cell) of said chimeric poxvirus (optionally variant and/or recombinant) is lower than that of at least two, more preferably at least three, more preferably at least four, and even more preferably each of the five oncolytic parental poxvirus strains (optionally variant and/or recombinant) Rabbitpox virus strain Utrecht (RPX), Cowpox virus strain Brighton (CPX), Vaccinia virus strain Copenhagen (COP), Vaccinia virus strain Wyeth (WY) and Vaccinia virus strain Western Reserve (WR).

[0037] In a fourth aspect, the invention provides a chimeric poxvirus (optionally variant and/or recombinant), wherein, for at least one organ, the therapeutic index of said chimeric poxvirus (optionally variant and/or recombinant) is higher than the therapeutic index measured in the same conditions and at the same time post-infection of at least one of the five oncolytic parental poxvirus strains (optionally variant and/or recombinant) Rabbitpox virus strain Utrecht (RPX), Cowpox virus strain Brighton (CPX), Vaccinia virus strain Copenhagen (COP), Vaccinia virus strain Wyeth (WY) and Vaccinia virus strain Western Reserve (WR) wherein for a given organ, a given tumor, a given virus, given conditions and a given time post-infection, the therapeutic index TI(organ, tumor, virus, conditions, time post-infection) is defined as:

[0038] TI(organ, tumor, virus, conditions, time post-infection)=(replication of virus in organ tumor cells/replication of virus in organ healthy cells).

[0039] In a preferred embodiment, for at least one organ, the therapeutic index of said chimeric poxvirus (optionally variant and/or recombinant) is higher than the therapeutic index measured in the same conditions and at the same time post-infection of the parental Vaccinia virus strain Copenhagen (optionally variant and/or recombinant). More preferably, for at least one organ, the therapeutic index of said chimeric poxvirus (optionally variant and/or recombinant) is higher than the therapeutic index measured in the same conditions and at the same time post-infection of at least two of, more preferably at least three of, more preferably at least four of, and even more preferably each of the five oncolytic parental poxvirus strains (optionally variant and/or recombinant) Rabbitpox virus strain Utrecht (RPX), Cowpox virus strain Brighton (CPX), Vaccinia virus strain Copenhagen (COP), Vaccinia virus strain Wyeth (WY) and Vaccinia virus strain Western Reserve (WR).

[0040] In a fifth aspect, the invention provides a chimeric poxvirus (optionally variant and/or recombinant), wherein for at least one producer cell (preferably a tumor cell), the extracellular-enveloped virus (EEV)-secretion capacity (SC) (abbreviated as EEV-SC) of said chimeric poxvirus (optionally variant and/or recombinant) is higher than the EEV-SC measured in the same conditions and at the same time post-infection of at least one of the six parental poxvirus strains (optionally variant and/or recombinant) Rabbitpox virus strain Utrecht (RPX), Cowpox virus strain Brighton (CPX), Vaccinia virus strain Copenhagen (COP), Vaccinia virus strain Wyeth (WY), Vaccinia virus strain Western Reserve (WR) and Modified Vaccinia virus strain Ankara (MVA), wherein for a given virus, a given producer cell, given conditions and a given time after viral infection, said EEV-SC is the ratio of extracellular enveloped virus (EEV) to the total forms of the virus (extracellular enveloped virus (EEV) and intracellular mature virus (IMV) form of the virus), defined as:

[0041] EEV-SC (virus, producer cell, conditions, time post-infection)=number of EEV particles/number of (EEV+IMV) particles.

[0042] In a preferred embodiment, the invention provides a chimeric poxvirus (optionally variant and/or recombinant), wherein for at least one producer cell (preferably a tumor cell), the EEV-SC of said chimeric poxvirus (optionally variant and/or recombinant) is higher than the EEV-SC measured in the same conditions and at the same time post-infection of the parental Vaccinia virus strain Copenhagen (COP) (optionally variant and/or recombinant) or the parental Rabbitpox virus strain Utrecht (RPX) (optionally variant and/or recombinant). More preferably, for at least one producer cell (preferably a tumor cell), the EEV-SC of said chimeric poxvirus (optionally variant and/or recombinant) is higher than the EEV-SC measured in the same conditions and at the same time post-infection of at least two of the six parental poxvirus strains (optionally variant and/or recombinant) Rabbitpox virus strain Utrecht (RPX), Cowpox virus strain Brighton (CPX), Vaccinia virus strain Copenhagen (COP), Vaccinia virus strain Wyeth (WY), Vaccinia virus strain Western Reserve (WR) and Modified Vaccinia virus strain Ankara (MVA). For instance, for at least one producer cell (preferably a tumor cell), the EEV-SC of said chimeric poxvirus (optionally variant and/or recombinant) is higher than the EEV-SCs measured in the same conditions and at the same time post-infection of the parental Vaccinia virus strain Copenhagen (COP) (optionally variant and/or recombinant) and the parental Rabbitpox virus strain Utrecht (RPX) (optionally variant and/or recombinant). In a more preferred embodiment, for at least one producer cell (preferably a tumor cell), the EEV-SC of said chimeric poxvirus (optionally variant and/or recombinant) is higher than the EEV-SC measured in the same conditions and at the same time post-infection of at least three, more preferably at least four, at least five, and more preferably each of the six parental poxvirus strains (optionally variant and/or recombinant) Rabbitpox virus strain Utrecht (RPX), Cowpox virus strain Brighton (CPX), Vaccinia virus strain Copenhagen (COP), Vaccinia virus strain Wyeth (WY), Vaccinia virus strain Western Reserve (WR) and Modified Vaccinia virus strain Ankara (MVA). Alternatively, or in combination, for at least one producer cell (preferably a tumor cell), the EEV-SC of said chimeric poxvirus (optionally variant and/or recombinant) is higher than the EEV-SC measured in the same conditions and at the same time post-infection of Vaccinia virus strain IHD-J.

[0043] Preferably, in said fifth aspect, for at least one tumor, the spreading capacity of said chimeric poxvirus (optionally variant and/or recombinant) is higher than the spreading capacity measured in the same conditions and at the same time post-infection of at least one of the six parental poxvirus strains (optionally variant and/or recombinant) Rabbitpox virus strain Utrecht (RPX), Cowpox virus strain Brighton (CPX), Vaccinia virus strain Copenhagen (COP), Vaccinia virus strain Wyeth (WY), Vaccinia virus strain Western Reserve (WR) and Modified Vaccinia virus strain Ankara (MVA), wherein for a given virus, producer cell, conditions and time post-infection, the spreading capacity is defined as the capacity of the virus to disseminate between cells (e.g. tumor cells) or between tumors (e.g. spreading from an injected tumor to a distal tumor). It is known that the spreading capacity is related to the formation of EEV particles: the more EEV a virus can generate, the higher its capacity to spread. The spreading capacity can be evaluated by various techniques well known to those skilled in the art, including Virus Comet Assay, said assay allowing the evaluation of comet tail formation (e.g.: number of comets, size of the comet tail). In some cases, an increase in the number of comets or size of the comet tail can indicate an increase in the amount of EEV relative to IMV forms of a viral strain.

[0044] In a preferred embodiment, for at least one tumor, the spreading capacity of said chimeric poxvirus (optionally variant and/or recombinant) is higher than the spreading capacity measured in the same conditions and at the same time post-infection of the parental Vaccinia virus strain Copenhagen (COP) (optionally variant and/or recombinant) or the parental Rabbitpox virus strain Utrecht (RPX) (optionally variant and/or recombinant). More preferably, for at least one tumor, the spreading capacity of said chimeric poxvirus (optionally variant and/or recombinant) is higher than the spreading capacity measured in the same conditions and at the same time post-infection of at least two of the six parental poxvirus strains (optionally variant and/or recombinant) Rabbitpox virus strain Utrecht (RPX), Cowpox virus strain Brighton (CPX), Vaccinia virus strain Copenhagen (COP), Vaccinia virus strain Wyeth (WY), Vaccinia virus strain Western Reserve (WR) and Modified Vaccinia virus strain Ankara (MVA). For instance, for at least one tumor, the spreading capacity of said chimeric poxvirus (optionally variant and/or recombinant) is higher than the spreading capacities measured in the same conditions and at the same time post-infection of the parental Vaccinia virus strain Copenhagen (COP) (optionally variant and/or recombinant) and the parental Rabbitpox virus strain Utrecht (RPX) (optionally variant and/or recombinant). In a more preferred embodiment, for at least one tumor, the spreading capacity of said chimeric poxvirus (optionally variant and/or recombinant) is higher than the spreading capacity of at least three, preferably at least four, more preferably at least five or even more preferably each of the six parental poxvirus strains (optionally variant and/or recombinant) Rabbitpox virus strain Utrecht (RPX), Cowpox virus strain Brighton (CPX), Vaccinia virus strain Copenhagen (COP), Vaccinia virus strain Wyeth (WY) Vaccinia virus strain Western Reserve (WR) and Modified Vaccinia virus strain Ankara (MVA).

[0045] In a sixth aspect, the invention provides a chimeric poxvirus (optionally variant and/or recombinant), wherein, for at least one poxvirus-specific antibody and tumor, the neutralization rate of said chimeric poxvirus (optionally variant and/or recombinant) is lower than the neutralization rate measured in the same conditions and at the same time post-infection of at least one of the six parental poxvirus strains (optionally variant and/or recombinant) Rabbitpox virus strain Utrecht (RPX), Cowpox virus strain Brighton (CPX), Vaccinia virus strain Copenhagen (COP), Vaccinia virus strain Wyeth (WY), Vaccinia virus strain Western Reserve (WR) and Modified Vaccinia virus strain Ankara (MVA), wherein for a given virus, a given tumor, a given poxvirus-specific antibody, given conditions and a given time post-infection, the neutralization rate (NT(virus, tumor, conditions, time post-infection)) measures the antibody-induced inhibition of the virus' oncolytic power and is defined as:

[0046] NT(virus, tumor, Poxvirus-specific antibody, conditions, time post-infection)=EC50 (with poxvirus-specific antibody)/EC50 (without poxvirus-specific antibody).

[0047] In a preferred embodiment, for at least one poxvirus-specific antibody and tumor, the neutralization rate of said chimeric poxvirus (optionally variant and/or recombinant) is lower than the neutralization rate measured in the same conditions and at the same time post-infection of the parental Vaccinia virus strain Copenhagen (COP) (optionally variant and/or recombinant). More preferably, for at least one poxvirus-specific antibody and tumor, the neutralization rate of said chimeric poxvirus (optionally variant and/or recombinant) is lower than the neutralization rate of at least two, preferably at least three, more preferably at least four, more preferably at least five, and even more preferably each of the six parental poxvirus strains (optionally variant and/or recombinant) Rabbitpox virus strain Utrecht (RPX), Cowpox virus strain Brighton (CPX), Vaccinia virus strain Copenhagen (COP), Vaccinia virus strain Wyeth (WY), Vaccinia virus strain Western Reserve (WR) and Modified Vaccinia virus strain Ankara (MVA).

[0048] In a seventh aspect, the invention provides a chimeric poxvirus (optionally variant and/or recombinant), wherein the complement-mediated virus neutralization rate of said chimeric poxvirus (optionally variant and/or recombinant) is lower than the complement-mediated virus neutralization rate measured in the same conditions of at least one of the six parental poxvirus strains (optionally variant and/or recombinant) Rabbitpox virus strain Utrecht (RPX), Cowpox virus strain Brighton (CPX), Vaccinia virus strain Copenhagen (COP), Vaccinia virus strain Wyeth (WY), Vaccinia virus strain Western Reserve (WR) and Modified Vaccinia virus strain Ankara (MVA), wherein for a given virus and given conditions the complement-mediated virus neutralization rate (CMV-NT(virus, conditions)) measures the complement induced inhibition of the virus' oncolytic power and is defined as:

[0049] CMV-NT(virus, conditions)=virus titer (human serum)/virus titer (heat-inactivated serum).

[0050] In a preferred embodiment, the complement-mediated virus neutralization rate of said chimeric poxvirus (optionally variant and/or recombinant) is lower than the complement-mediated virus neutralization rate measured in the same conditions of the parental Vaccinia virus strain Copenhagen (COP) (optionally variant and/or recombinant). More preferably, the complement-mediated virus neutralization rate of said chimeric poxvirus (optionally variant and/or recombinant) is lower than the complement-mediated virus neutralization rate measured in the same conditions of at least two, preferably at least three, more preferably at least four, more preferably at least five, and even more preferably each of the six parental poxvirus strains (optionally variant and/or recombinant) Rabbitpox virus strain Utrecht (RPX), Cowpox virus strain Brighton (CPX), Vaccinia virus strain Copenhagen (COP), Vaccinia virus strain Wyeth (WY), Vaccinia virus strain Western Reserve (WR) and Modified Vaccinia virus strain Ankara (MVA).

[0051] In an eighth aspect, the invention provides a chimeric poxvirus (optionally variant and/or recombinant), wherein for at least one producer cell (preferably a tumor cell), the syncytia formation capacity of said chimeric poxvirus (optionally variant and/or recombinant) is higher than the syncytia formation capacity measured in the same conditions and at the same time post-infection of at least one of the six parental poxvirus strains (optionally variant and/or recombinant) Rabbitpox virus strain Utrecht (RPX), Cowpox virus strain Brighton (CPX), Vaccinia virus strain Copenhagen (COP), Vaccinia virus strain Wyeth (WY), Vaccinia virus strain Western Reserve (WR) and Modified Vaccinia virus strain Ankara (MVA).

[0052] In a preferred embodiment, the invention provides a chimeric poxvirus (optionally variant and/or recombinant), wherein for at least one producer cell (preferably a tumor cell), the syncytia formation capacity of said chimeric poxvirus (optionally variant and/or recombinant) is higher than the syncytia formation capacity measured in the same conditions and at the same time post-infection of the parental Vaccinia virus strain Copenhagen (COP) (optionally variant and/or recombinant). More preferably, for at least one producer cell (preferably a tumor cell), the syncytia formation capacity of said chimeric poxvirus (optionally variant and/or recombinant) is higher than the syncytia formation capacity measured in the same conditions and at the same time post-infection of at least two of the six parental poxvirus strains (optionally variant and/or recombinant) Rabbitpox virus strain Utrecht (RPX), Cowpox virus strain Brighton (CPX), Vaccinia virus strain Copenhagen (COP), Vaccinia virus strain Wyeth (WY), Vaccinia virus strain Western Reserve (WR) and Modified Vaccinia virus strain Ankara (MVA). For instance, in a preferred embodiment, for at least one producer cell (preferably a tumor cell), the syncytia formation capacity of said chimeric poxvirus (optionally variant and/or recombinant) is higher than the syncytia formation capacity measured in the same conditions and at the same time post-infection of at least two, preferably at least three, more preferably at least four, at least five, and more preferably each of the six parental poxvirus strains (optionally variant and/or recombinant) Rabbitpox virus strain Utrecht (RPX), Cowpox virus strain Brighton (CPX), Vaccinia virus strain Copenhagen (COP), Vaccinia virus strain Wyeth (WY), Vaccinia virus strain Western Reserve (WR) and Modified Vaccinia virus strain Ankara (MVA).

[0053] The invention also provides a chimeric poxvirus (optionally variant and/or recombinant) combining features of the chimeric poxviruses (optionally variant and/or recombinant) described above in aspects one to eight.

[0054] The invention also relates to a chimeric poxvirus obtained or obtainable by a specific method of directed evolution as described below.

[0055] In a nineth aspect, the invention provides a method of directed evolution for obtaining a chimeric poxvirus with high anticancer activity, said method comprising:
[0056] (i) infecting a first tumor cell line with a plurality of parental poxvirus strains, wherein said tumor cell line is permissive for each parental poxvirus strain, so as to obtain a first infected tumor cell line;
[0057] (ii) amplifying said parental poxvirus strains on said first infected tumor cell line of step (i) during at least 12h (preferably at least 24h) and at most 3 days, so as to obtain one or more distinct chimeric poxviruses through homologous genomic recombination between at least two of said parental poxvirus strains in supernatant;
[0058] (iii) collecting the supernatant at the end of step (ii) containing the one or more distinct chimeric poxvirus(es);
[0059] (iv) infecting a second tumor cell line with the one or more distinct chimeric poxvirus(es) of the supernatant of step (iii), wherein said second tumor cell line is permissive for each parental poxvirus strain of steps (i) and (ii), so as to obtain a second infected tumor cell line;
[0060] (vₐ) amplifying the one or more distinct chimeric poxvirus(es) of step (iv) on said second infected tumor cell line of step (iv) during preferably at least 12 h and at most 24 h and then collecting the supernatant;
[0061] (vi) selecting one or more distinct chimeric poxvirus(es) of step (vₐ) having, for at least one third tumor cell line, an oncolytic power higher than the oncolytic power measured in the same conditions and at the same time post-infection of at least one, preferably several, and more preferably all the parental oncolytic poxvirus strains in the first tumor cell line of step (i) and/or in the second tumor cell line of step (iv), wherein for a given tumor, a given virus, given conditions and a given time post-infection, an oncolytic power OP(tumor, virus, conditions, time post-infection) is defined as:
[0062] OP(tumor, virus, conditions, time post-infection)=(100-percentage of surviving tumor cells after infection by virus).

[0063] More particularly, said method of directed evolution comprises the following steps:
[0064] (i) infecting a first tumor cell line with a plurality of parental poxvirus strains, wherein said tumor cell line is permissive for each parental poxvirus strain, so as to obtain a first infected tumor cell line;
[0065] (ii) amplifying said parental poxvirus strains on said first infected tumor cell line of step (i) during at least 12h (preferably at least 24h) and at most 3 days, so as to obtain one or more distinct chimeric poxviruses through homologous genomic recombination between at least two of said parental poxvirus strains in supernatant;
[0066] (iii′) collecting the supernatant at the end of step (ii) containing the one or more distinct chimeric poxvirus(es), and performing a 5 to 20-fold dilution series so as to obtain at least two diluted supernatants each containing one or more chimeric poxvirus(es);
[0067] (iv′) infecting at least two samples of a second tumor cell line with the one or more distinct chimeric poxvirus(es) of each of the diluted supernatants of step (iii′), wherein said second tumor cell line is permissive for each parental poxvirus strain of steps (i) and (ii), so as to obtain at least two samples of the second infected tumor cell line;
[0068] (v′ₐ) amplifying the one or more distinct chimeric poxvirus(es) of each of the at least two samples of the second infected tumor cell line of step (iv′) on the second infected tumor cell line of step (iv′) during preferably at least 12 h and at most 24h;
[0069] (v′_{b}) collecting the supernatant from the sample of infected second tumor cell line infected with the less diluted supernatant that shows no sign of cytopathic effect, and performing a 5 to 20-fold dilution series;
[0070] (v′_{c}) repeating steps (iv), (v′ₐ) and (v′_{b}) until one or more distinct chimeric poxvirus(es) meeting the selection criteria of step (vi) is obtained; and
[0071] (vi) selecting one or more distinct chimeric poxvirus(es) of step (v′_{c}) having, for at least one third tumor cell line, an oncolytic power higher than the oncolytic power measured in the same conditions and at the same time post-infection of at least one, preferably several, and more preferably higher than all the parental oncolytic poxvirus strains in the first tumor cell line of step (i) or in the second tumor cell line of step (iv′), wherein for a given tumor, a given virus, given conditions and a given time post-infection an oncolytic power OP(tumor, virus, conditions, time post-infection) is defined as:

$$OP ( tumor , virus , conditions , time post - infection ) = ( 100 - percentage of surviving tumor cells after infection by virus ) .$$

[0072] Even more particularly, said method of directed evolution comprises the following steps:
[0073] i) infecting a first tumor cell line with a plurality of parental poxvirus strains, wherein said tumor cell line is permissive for each parental poxvirus strain, so as to obtain a first infected tumor cell line;
[0074] (ii) amplifying said parental poxvirus strains on said first infected tumor cell line of step (i) during at least 12h (preferably at least 24h) and at most 3 days, so as to obtain one or more distinct chimeric poxviruses through homologous genomic recombination between at least two of said parental poxvirus strains;
[0075] (iii″ₐ) collecting both cells and supernatant at the end of step (ii) containing one or more distinct chimeric poxvirus(es);
[0076] (iii″_{b}) infecting a second tumor cell line with both cells and supernatant containing one or more distinct chimeric poxvirus(es) of step (iii″ₐ), wherein said second tumor cell line is permissive for each parental poxvirus strain of steps (i) and (ii), so as to obtain a second infected tumor cell line;
[0077] (iii″_{c}) amplifying one or more distinct chimeric poxvirus(es) of step (iii″b) on said second infected tumor cell line of step (iii″_{b}) during at least 48h (preferably at least 72h) and at most 3 days;
[0078] (iii″_{d}) collecting a fraction of the cells and supernatant containing one or more distinct chimeric poxvirus(es) of step (iii″_{c});
[0079] (iii″ₑ) repeating steps (iii″_{b}), (iii″_{c}) and (iii″ₐ) at least one time;
[0080] (iii″_{f}) collecting the supernatant at the end of step (iii″ₑ) containing one or more distinct chimeric poxvirus(es), and performing a 5 to 20-fold dilution series so as to obtain at least two diluted supernatants;
[0081] (iv″) infecting at least two samples of a third tumor cell line with the one or more distinct chimeric poxvirus(es) of each of the diluted supernatants of step (iii″_{f}), wherein said third tumor cell line is permissive for each parental poxvirus strain of steps (i) and (ii) so as to obtain at least two samples of the third infected tumor cell line;
[0082] (v″ₐ) amplifying the one or more distinct chimeric poxvirus(es) of each of the at least two samples of the third infected tumor cell line of step (iv″) on a third infected tumor cell line of step (iv″) during at least 12 h and at most 24h;
[0083] (v″_{b}) collecting the supernatant from the sample of third infected tumor cell line infected with the less diluted supernatant that shows no sign of cytopathic effect, and performing a 5 to 20-fold dilution series;
[0084] (v″_{c}) repeating steps (iv″), (v″ₐ) and (v″_{b}) until one or more distinct chimeric poxvirus(es) meeting the selection criteria of step (vi) is obtained; and
[0085] (vi) selecting one or more distinct chimeric poxvirus(es) of step (v″_{c}) having, for at least one fourth tumor cell line, an oncolytic power higher than the oncolytic power measured in the same conditions and at the same time post-infection of at least one, preferably several, and more preferably all the parental oncolytic poxvirus strains in the tumor cell line of steps (iv″), wherein for a given tumor, a given virus, given conditions and a given time post-infection, an oncolytic power OP(tumor, virus, conditions, time post-infection) is defined as:

[0086] OP(tumor, virus, conditions, time post-infection)=(100-percentage of surviving tumor cells after infection by virus).

[0087] In a specific embodiment, said parental poxviruses strains used in first step (i) are selected in the group consisting of Rabbitpox virus strain Utrecht (RPX), Cowpox virus strain Brighton (CPX), Vaccinia virus strain Copenhagen (COP), Vaccinia virus strain Western Reserve (WR), Vaccinia virus strain Wyeth (WY), Modified Vaccinia virus strain Ankara (MVA), Raccoonpox virus strain Herman (RCN), ORF virus strain NZ2 (ORF), Pseudocowpox strain TJS (PCP), Bovine Papular stomatitis virus strain Illinois 721 (BPS), Myxoma virus strain Lausanne (MYX), Squirrelpox virus strain Kilham (SQF), Fowlpox virus strain FP9 (FPV), Swinepox virus strain Kasza (SPV), Yaba-like disease virus strain Davis (YLD) and Cotia virus strain SP An 232 (CTV). More preferably, said parental poxviruses strains used in first step (i) comprise at least one, preferably at least two, at least three, at least four, at least five, or even all six of Rabbitpox virus strain Utrecht (RPX), Cowpox virus strain Brighton (CPX), Vaccinia virus strain Copenhagen (COP), Vaccinia virus strain Western Reserve (WR), Vaccinia virus strain Wyeth (WY) and Modified Vaccinia virus strain Ankara (MVA). The inventors showed that these 6 parental poxviruses were able to recombine with each other and the parental poxviruses strains used in first step (i) may thus be selected in this more limited group. In an embodiment, the parental poxviruses strains used in first step (i) may notably consist of Rabbitpox virus strain Utrecht (RPX), Cowpox virus strain Brighton (CPX), Vaccinia virus strain Copenhagen (COP), Vaccinia virus strain Western Reserve (WR), Vaccinia virus strain Wyeth (WY) and Modified Vaccinia virus strain Ankara (MVA).

[0088] In any one of the above methods of directed evolution, the first, second and optionally third permissive tumor cell lines may be different or the same. They are from higher mammal's origins, preferably said permissive tumor cell lines used as first, second, third and optionally fourth tumor cell line in the above methods are selected in the group consisting of A549, CAL-33, HepG2, HCT116, Hela, SK-MEL-1, PANC-1, Hs746T, SK-OV-3 and CV-1, with a preference for A549. In a preferred embodiment, the first, second, third and optionally fourth permissive tumor cell lines are the same and are preferably all A549 lung cancer cell line.

[0089] In a further aspect, the present invention also relates to a variant chimeric poxvirus, i.e.: a chimeric poxvirus according to the invention, which has been engineered by altering one or more viral gene(s) (e.g.: deletion of the TK encoding gene).

[0090] In a further aspect, the present invention also relates to a recombinant chimeric poxvirus, i.e.: a chimeric poxvirus according to the invention, which comprises one or more heterologous transgene(s).

[0091] In a further aspect, the present invention also relates to a recombinant variant chimeric poxvirus, i.e.: a chimeric poxvirus according to the invention, which has been engineered by altering one or more viral gene(s) (e.g.: deletion of the TK encoding gene) and comprises one or more heterologous transgene(s).

[0092] In a further aspect, the present invention also concerns a process for producing a chimeric (optionally variant and/or recombinant) poxvirus, comprising at least the steps of:
[0093] (i) infecting a producer cell with the chimeric (optionally variant and/or recombinant) poxvirus according to the invention as disclosed herein;
[0094] (ii) culturing said infected producer cell under conditions which are appropriate for enabling chimeric poxvirus (optionally variant and/or recombinant) to be produced, and;
[0095] (iii) recovering said chimeric poxvirus (optionally variant and/or recombinant) from the producer cell culture.

[0096] Optionally, the recovered chimeric (optionally variant and/or recombinant) poxvirus can be purified at least partially.

[0097] Another aspect of the present invention relates to an isolated nucleic acid encoding the chimeric (optionally variant and/or recombinant) poxvirus of the invention.

[0098] In another aspect of the invention is provided a composition comprising the chimeric (optionally variant and/or recombinant) poxvirus of the invention and a pharmaceutically acceptable vehicle. In one embodiment, the chimeric (optionally variant and/or recombinant) poxvirus is preferably formulated for parenteral route administration, with a preference for intravenous or intratumoral route.

[0099] Another aspect of the present invention relates to the chimeric (optionally variant and/or recombinant) poxvirus or the composition of the invention, for use as a drug, preferably for the treatment of a proliferative disease. In a preferred embodiment, said proliferative disease is selected from cancers, tumors and restenosis.

[0100] Another aspect of the present invention relates to a method for treating a disease in a subject in need thereof comprising the administration to said subject of the chimeric poxvirus (optionally variant and/or recombinant) or the composition according to the invention. In one embodiment, said disease is a proliferative disease, wherein said proliferative disease is preferably selected from cancers, tumors and restenosis.

### DESCRIPTION OF THE FIGURES

[0101] In order to make the reading process easier, Table 1 is provided, comprising the description of the code references used in the Figures and Examples. Table 1 is provided in the Example section.

[0102] FIG. 1: Oncolytic effect of POXSTG19503 on a panel of tumor cells. Cells (3×10⁵ cells/well plated in 6-well culture dishes) were infected with the indicated MOI and cell viability was determined 5 days later by trypan blue exclusion. The parental COP was used as reference. The results are presented as a mean of triplicate experiments±SD.

[0103] FIG. 2: Genome analysis. (A) Annotated POXSTG19503 mono-ITR genome. Large grey arrows highlight the segments longer than 500 nucleotides 100% identical to parental virus genomes, indicated by labels and greyscale code from the upper right legend. The 3′ ITR is indicated by the terminal black arrow. (B) Region 40 kb-60 kb extracted from the global alignment of the core-region of POXSTG19503 and the parental genomes. Large grey arrows highlight the segments longer than 500 nucleotides 100% identical to parental virus genomes, indicated by labels and greyscale code from the upper right legend. Automatically detected open reading frames are reported by smaller dark grey arrows in the lower part of each lane.

[0104] FIG. 3: Oncolytic effect of POXSTG19508 on A549 (A), HCT116 (B) and HepG2 (C) tumor cells. Cells (3×10⁵ cells/well plated in 6-well culture dishes) were infected with the indicated MOI and cell viability was determined 4 days later by trypan blue exclusion. The 6 parental poxvirus strains were used as reference. The results are presented as a mean of triplicate experiments±SD.

[0105] FIG. 4: Replication in tumor cells and in primary human cells. (A) HepG2 tumor cells were infected at MOI 10⁻⁵ and harvested 3 days post infection. Human primary hepatocytes were infected at MOI 10⁻⁴ and harvested 3 days post infection. 3D Phenion FT skin models were infected with 1.10⁵ PFU (plaque-forming unit) and harvested 7 days post infection. Viral progeny production was determined by plaque titration. Results are expressed as viral fold amplification (corresponding to output/input ratio). The results are presented as a mean of triplicate experiments±SD. (B) Ratio between viral fold amplification obtained in HepG2 hepatocarcinoma cells and hepatocytes 3 days post infection. Values are represented as the mean of three individual determinations.

[0106] FIG. 5: Functionality of FCU1 expressed by the chimeric poxvirus POXSTG19508. Conversion of 5-fluorocytosine (5-FC) to 5-fluorouracil (5-FU) and release of 5-FU in the cell culture supernatant. A549 tumor cells were infected with the indicated vector at a MOI 10⁻⁴ and then incubated with 1 mM 5-FC added 6 hours post infection. The relative concentration of 5-FC and 5-FU in the culture supernatant was measured by HPLC from day 1 to day 3 post infection. The results are expressed as the percentage of 5-FU released relative to the total amount of 5-FC+5-FU. Values are represented as the mean of three individual determinations±SD.

[0107] FIG. 6: Production of EEV form and total progeny viruses at early times after infection of a A549 monolayer. A549 cells were infected with VVTG17111 or POXSTG19508 at MOI of 0.1. Supernatant or cell fraction were collected at 16- and 24-hours post-infection. Virus titers from the supernatants alone (EEV) and from both supernatants and cells (IMV+EEV, total progeny virus) at 16 hours (A) and 24 hours (B) post-infection are presented. (C) Ratio of EEV to IMV at 16- and 24-hours post-infection. The results are presented as a mean of triplicate experiments±SD.

[0108] FIG. 7: Representative images of comets. The indicated viruses were plated on monolayers of A549 cells. After 2 days, plaques were imaged using fluorescence microscopy (GFP). After being imaged, cells were stained with crystal violet (CV).

[0109] FIG. 8: Production of EEV form and total progeny viruses at early times after infection of a A549 monolayer. A549 cells were infected with the indicated viruses at MOI of 0.1. Supernatant or cell fraction were collected at 16- and 24-hours post-infection. Virus titers from the supernatants alone (EEV) and from both supernatants and cells (IMV+EEV, total progeny virus) at 16 hours (A) and 24 hours (B) post-infection are presented. (C) Ratio of EEV to IMV at 16- and 24-hours post-infection. Values are represented as the mean of three individual determinations±SD.

[0110] FIG. 9: VACV neutralization assay. Viability of HCT116 tumor cells infected by TG6002 (A) or POXSTG19508 (B) in presence of patient-derived serum collected 42 days after IV administration of TG6002 (immunized serum). Condition without serum (control) and condition using serum collected from the same patient before administration of TG6002 (pre-immunized serum) were used as negative controls. The half maximal effective concentration (EC50) of the two viruses was determined by infecting HCT116 cells seeded in 96-well plate (1×10⁴ cells/well) with serial dilutions of the indicated virus and evaluating cell death 3 days post-infection by a CellTiter-Blue Cell Viability Assay. Cell viability was determined by comparison to uninfected cell controls. The results are presented as a mean of triplicate experiments±SD. (C) Table of EC50s determined by fitting a sigmoidal dose-response curve from the results obtained in (A) and (B).

[0111] FIG. 10: Viral immunostaining in the HCT116 xenograft tumors. (A) Immunostaining of the tumors performed 2, 7 and 16 days after a single intravenous injection of the indicated virus at 1×10⁵ PFU. Cellular DNA was stained in blue with DAPI (medium grey on the pictures) and virus was stained in green (light grey on the pictures). (B) Area density of virus in tumors of 3 mice per group at days 2, 7 and 16 post-injection. The results are presented as a mean of the 3 tumors+SD.

[0112] FIG. 11: Viral immunostaining in the B16F10 syngeneic murine tumors. (A) Immunostaining of the tumors performed 3 and 8 days after a single intratumoral injection of the indicated virus at 1×10⁷ PFU. Cellular DNA was stained in blue with DAPI (medium grey on the pictures) and virus was stained in green (light grey on the pictures). (B) Area density of virus in tumors of 3 mice per group at days 3 and 8 post-injection. The results are presented as a mean of the 3 tumors+SD.

[0113] FIG. 12: In vivo anti-tumor efficacy of POXSTG19508 in a colorectal xenograft model. Subcutaneous HCT116 tumors were implanted into the right flank of nude mice. On day 15 post-implantation, mice were treated with one intravenous administration of PBS (control), TG6002 or POXSTG19508 (indicated by a vertical arrow) at 3×10⁴ PFU. (A) Tumor growth dynamics of individual mice (n=10 per group). Vertical arrow indicates the systemic injection. (B) Kaplan-Meier survival analysis. Vertical arrow indicates the systemic injection. Significant differences among the group were determined by log-rank test. Ns: not significant.

[0114] FIG. 13: In vivo anti-tumor efficacy of POXSTG19508 in a hepatocarcinoma xenograft model. Subcutaneous HepG2 tumors were implanted into the right flank of nude mice. On day 28 post-implantation, mice were treated with one intravenous administration of PBS (control), TG6002 or POXSTG19508 (indicated by a vertical arrow) at 3×10⁵ PFU. (A) Tumor growth dynamics of individual mice (n=10 per group). Vertical arrow indicates the systemic injection. (B) Kaplan-Meier survival analysis. Vertical arrow indicates the systemic injection. Significant differences among the group were determined by log-rank test.

[0115] FIG. 14: In vivo anti-tumor efficacy of POXSTG19508 in the CT26 syngeneic murine tumor model. Subcutaneous CT26 tumors were implanted into the right flank of nude mice. On day 7, 9 and 11 post-implantation, mice were treated with daily intratumoral injections of PBS (control), TG6002 or POXSTG19508 (indicated by a vertical arrow) at 1×10⁷ PFU. (A) Tumor growth dynamics of individual mice (n=10 per group). (B) Kaplan-Meier survival analysis. Vertical arrows indicate the intratumoral injections. Significant differences among the group were determined by log-rank test. Ns: not significant.

[0116] FIG. 15: In vivo anti-tumor efficacy of POXSTG19508 in a bilateral flank xenograft mouse model. Subcutaneous HCT116 xenografts were injected intratumorally with 1×10⁶ PFU of TG6002, POXSTG19508 or PBS (control) only in the right-sided tumors (n=10 per group). (A) Tumor growth dynamics of injected tumors. (B) Tumor growth dynamics of uninjected tumors. (C) Kaplan-Meier survival analysis. Vertical arrow indicates the IT injection in the right-sided tumors. Significant differences among the group were determined by log-rank test. Ns: not significant. (D) Virus titer in injected and uninjected tumors at days 13 post-virus injection. Each dot represents one tumor. Horizontal bars represent the mean.

[0117] FIG. 16: In vivo anti-tumor efficacy of systemic administration of the chimeric poxvirus expressing mIL-12 in the B16F10 syngeneic murine tumor model.

[0118] Subcutaneous B16F10 tumors were implanted into the right flank of nude mice. On day 7 and 9 post-implantation, mice were treated with intravenous administration of PBS (control), VVTG19328 or POXSTG19847 at 1×10⁷ PFU. (A) Tumor growth dynamics of individual mice (n=10 per group). (B) Kaplan-Meier survival analysis. Vertical arrows indicate the systemic injections. Significant differences among the group were determined by log-rank test. Ns: not significant.

[0119] FIG. 17: Syncytia formation.

[0120] HCT116 cells were infected with VVTG17111 or POXSTG19508 at MOI 10⁻² or MOI 10⁻³. Cell morphology was observed at 40h (at MOI 10⁻²) or 60h (at MOI 10⁻³) post-infection by optical and fluorescence microscopy (GFP).

[0121] FIG. 18: Specific T cell response measured by IFNγ ELISpot on splenocytes of mice.

[0122] Specific T cell response against both tumor and virus measured by IFNγ ELISpot on splenocytes of mice bearing CT26 tumors treated intratumorally with VVTG17111, POXSTG19508 or vehicle as a negative control. Each bar represents the mean+/−SEM of quadruplicate measures of number of spots for 10⁶ splenocytes isolated from individual spleen. * P<0.001.

[0123] FIG. 19: Sensitivities to neutralization by complement.

[0124] TG6002 and POXSTG19508 were incubated with human serum for 1 h, then used to inoculate Vero cells and incubated for 3 days to allow plaque formation. The numbers of plaques obtained are expressed as percentages of the number of plaques obtained with heat-inactivated human serum. Heat-inactivated serum was used as a negative control. Data represents means of three experiments ±SD.

### DETAILED DESCRIPTION OF THE INVENTION

### General Definitions

[0125] The terms used in this specification generally have their ordinary meanings in the art, unless otherwise indicated. Certain terms are discussed below, or elsewhere in the specification, to provide additional guidance to the practitioner in describing the products and methods of the invention and how to use them. Moreover, alternative language and synonyms may be used for any one of the terms discussed herein. Synonyms for certain terms are provided. A recital of one or more synonyms does not exclude the use of the other synonyms. The use of examples anywhere in the specification, including examples of any terms discussed herein, is illustrative only, and in no way limits the scope and meaning of the invention or any exemplified term.

[0126] As used throughout the entire application, the terms “a” and “an” are used in the sense that they mean “at least one”, “at least a first”, “one or more” or “a plurality” of the referenced components or steps. For example, the term “a chimeric poxvirus” encompasses a single chimeric poxvirus as well as a plurality of chimeric poxvirus, including mixtures of different chimeric poxviruses.

[0127] The term “one or more” refers to either one or a number above one (e.g.: 2, 3, 4, etc.).

[0128] The term “at least” refers to either the number preceded by the expression “at least”, considered as the minimum, or a number above said minimum.

[0129] The term “and/or” wherever used herein includes the meaning of “and”, “or” and “all or any other combination of the elements connected by said term”.

[0130] The term “about” or “approximately” as used herein means within 20%, preferably within 10%, and more preferably within 5% of a given value or range.

[0131] The term “distinct” means “not identical”, “distinguished as not being the same”. For example, two distinct proteins have different amino-acid sequences, different shapes, etc.

[0132] As used herein, when used to define products and compositions, the terms “comprising” (and any form of comprising, such as “comprise” and “comprises”), “having” (and any form of having, such as “have” and “has”), “including” (and any form of including, such as “includes” and “include”) or “containing” (and any form of containing, such as “contains” and “contain”) are open-ended and do not exclude additional, unrecited elements or method steps. The expression “consisting essentially of” means excluding other components or steps of any essential significance. Thus, a composition consisting essentially of the recited components would not exclude traces, contaminants and pharmaceutically acceptable carriers. “Consisting of” shall mean excluding more than trace elements of other components or steps. In the present description, each time the term “comprising” (or any of its derivatives such as “comprise” and “comprises”) is used, the invention also relates to the same embodiment in which “comprising” (or any of its derivatives such as “comprise” and “comprises”) is replaced by “consisting essentially of” or “consisting of”.

[0133] The terms “protein”, “polypeptide”, and “peptide” are used interchangeably and refer to polymers of amino acid residues which comprise at least nine or more amino acids bonded via peptide bonds. The polymer can be linear, branched or cyclic and may comprise naturally occurring and/or amino acid analogues and it may be interrupted by non-amino acids. As a general indication, if the amino acid polymer is more than 50 amino acid residues, it is preferably referred to as a “polypeptide” or a “protein” whereas if it is 50 amino acids long or less, it is referred to as a “peptide”. Proteins, polypeptides and peptides are defined by amino acid sequences.

[0134] Within the context of the present invention, the terms “nucleic acid”, “nucleic acid molecule”, “polynucleotide” and “nucleotide sequence” are used interchangeably and define a polymer of any length of either polydeoxyribonucleotides (DNA) (e.g.: cDNA, genomic DNA, plasmids, vectors, viral genomes, isolated DNA, probes, primers and any mixture thereof) or polyribonucleotides (RNA) (e.g.: mRNA, antisense RNA, siRNA) or mixed polyribopolydeoxyribonucleotides. They encompass single or double-stranded, linear or circular, natural or synthetic, modified or unmodified polynucleotides. Moreover, a polynucleotide may comprise non-naturally occurring nucleotides and may be interrupted by non-nucleotide components.

[0135] The term “nucleotide” refers to any of various compounds consisting of a sugar, usually ribose or deoxyribose, a purine or pyrimidine base, and one or more phosphates. The expression “nucleotide” designates both ribonucleotides and deoxyribonucleotides.

[0136] In a general manner, the term “identity” or “identical” in the context of a virus sample refers to an amino acid to amino acid, or nucleotide to nucleotide correspondence between a polypeptide of the virus and another polypeptide of reference or between a nucleic acid sequence of the virus and another nucleic acid sequence of reference respectively. The percentage of identity between two sequences is a function of the number of identical positions shared by the sequences after optimal global alignment, taking into account the number of gaps which need to be introduced for optimal alignment of the two entire sequences and the length of each gap. Various computer programs and mathematical algorithms are available in the art to determine the percentage of identity between amino acid sequences after optimal global alignment, such as for example the Mafft, ClustalW or ALIGN in Atlas of Protein Sequence and Structure (Dayhoffed, 1981, Suppl., 3:482-9), and the algorithm of Needleman et Wunsh (J. Mol. Biol. 48,443-453, 1970), such computer program and mathematical algorithm of global alignment are selected according to the common general knowledge of a person skilled in the art to perform the more bioinformatically or biologically relevant and optimal global alignment. Programs for determining identity between nucleotide sequences optimal global alignment are also available in specialized data base (e.g.: Genbank, the Wisconsin Sequence Analysis Package, BESTFIT, FASTA and GAP programs).

[0137] As used herein, the term “host cell” should be understood broadly without any limitation concerning particular organization in tissue, organ, or isolated cells. Such cells may be of a unique type of cells or a group of different types of cells such as cultured cell lines, healthy cells (preferably primary cells) and dividing cells. In the context of the invention, the term “host cells” includes prokaryotic cells, lower eukaryotic cells such as yeast, and other eukaryotic cells such as insect cells, plant and mammalian (e.g.: human or non-human) cells as well as cells allowing infection and replication of the chimeric poxvirus of the invention (these cells are designated as “permissive cells”). When used for producing the chimeric poxvirus of the invention, permissive cells are referred to “producer cells” are host cells permissive for infection and replication of the chimeric poxvirus of the invention.

[0138] The terms “chimeric virus” or “virus chimera” are interchangeable and used according to their ordinary meaning in virology: they refer to a hybrid virus created by joining nucleic acid fragments from two or more different virus strains, which are referred to as “parental viruses”. Chimeric viruses may be obtained through a process of virus directed evolution, in which a mixture of several parental viruses is contacted with producer cells of interest in order to generate recombination events between the genomes of several parental viruses, thus generating a pool of chimeric viruses.

[0139] Within the context of the present invention, the term “chimeric gene” defines a hybrid gene formed through the recombination of parts or entire fragments of a gene from two or more different virus strains.

[0140] The term “wild-type virus” designates a parental or chimeric virus, wherein said virus has not been engineered by altering one or more gene(s) of the viral genome and does not comprise any heterologous transgene.

[0141] The term “variant virus” designates a parental or chimeric virus, wherein said virus has been engineered by altering one or more viral gene(s) (e.g.: deletion of the TK encoding gene).

[0142] The term “recombinant virus” designates a parental or chimeric virus, wherein said virus comprises one or more heterologous transgene(s).

[0143] The terms “recombinant variant virus” or “variant recombinant virus” are used interchangeably and refer to a parental or chimeric virus, wherein said virus has been engineered by altering one or more viral gene(s) (e.g.: deletion of the TK encoding gene) and comprises one or more heterologous transgene(s).

[0144] The term “oncolytic” as used herein refers to the ability of a virus to replicate in dividing cells (e.g.: a proliferative cell such as a cancer cell) with the aim of slowing the growth and/or lysing said dividing cell, either in vitro or in vivo. An oncolytic virus may be characterized by its “oncolytic power”. For a given tumor, a given virus, given conditions and time post-infection, the oncolytic power OP(tumor, virus, conditions, time post-infection) is defined as:

[0145] OP(tumor, virus, conditions, time post-infection)=(100-percentage of surviving tumor cells after infection by virus).

[0146] For a given tumor and virus, the value of oncolytic power OP(tumor, virus, conditions, time post-infection) may vary depending on the conditions (e.g. MOI, culture medium, tumor cell density, temperature, etc., in particular MOI) and time post-infection, and when the oncolytic powers OP(tumor, virus, conditions, time post-infection) of two viruses are compared, the comparison is made in the same conditions and at the same time post-infection. However, for a given tumor and two given viruses, any suitable conditions (see examples below) and time post-infection may be used for comparison (provided that they are identical for the two viruses), as the hierarchy of oncolytic power will generally remain the same for any suitable conditions and time post-infection when the difference in oncolytic power between the two viruses is sufficient (e.g.: at least a factor 3) or significant. For a given tumor and virus, the oncolytic power may generally be determined in vitro, 3 to 5 days post-infection of tumor cells with the virus at an MOI of 10⁻⁵ to 10⁻².

[0147] The oncolytic power is expressed as a percentage and represents the percentage of specific tumor cells lysed by a given virus in specific conditions and at a specific time post-infection. For example, 5 days post infection, a vaccinia virus strain Copenhagen at an MOI of 10⁻⁵ has an oncolytic power of 24% on A549 tumor cell cultured at 37° C., 5% CO2, in Dulbecco's Modified Eagle Medium (DMEM) with 10% of Fetal Calf Serum (FCS) s, meaning that 24% of A549 tumor cells were lysed by COP(see FIG. 1). The higher the percentage is, the more oncolytic a given virus for a given tumor is.

[0148] The terms “replication”, “viral replication” and “virus replication” refer to the replication of the viral genome in target host cells (e.g.: tumors or healthy cells), or to the synthesis of viral proteins in the target host cells. The steps of a viral life cycle include, but are not limited to, virus attachment to the host cell surface, penetration or entry of the host cell (e.g. through receptor mediated endocytosis or membrane fusion), uncoating (the process whereby the viral capsid is removed and degraded by viral enzymes or host enzymes thus releasing the viral genomic nucleic acid), genome replication, synthesis of viral messenger RNA (mRNA), viral protein synthesis, and assembly of viral ribonucleoprotein complexes for genome replication, assembly of virus particles, post-translational modification of the viral proteins, and release from the host cell by lysis or budding and acquisition of a phospholipid envelope which contains embedded viral glycoproteins. In a cell, there is a viral replication when the viral titer (measured intra- and extra-cellularly) is multiplied by a number higher than 1. In a permissive tumor cell line, the level of virus replication can be low (e.g.: 48 hours post-infection, multiplication of the viral titer by a number higher than 1 and lower than 20000), medium (e.g.: 48 hours post-infection, multiplication of the viral titer by a number comprised between 20000 to 40000) or high (e.g.: 48 hours post-infection, multiplication of the viral titer by a number higher than 40000).

[0149] For given tumor or healthy cell (preferably primary cell), the viral replication may generally be determined in vitro, 2 to 8 days post-infection of tumor or healthy cell (preferably primary cell) with the virus at an MOI of 10⁻⁵ to 10⁻².

[0150] The term “therapeutic index” represents the ratio between the viral replication on tumor and corresponding healthy cells (i.e.: healthy cells from the same organ). For given organ healthy and tumor cells, a given virus, given conditions and a given time post-infection, the therapeutic index TI(organ healthy, organ tumor, virus, conditions, time post-infection) is defined as follows:

[0151] TI(organ healthy, organ tumor, virus, conditions, time post-infection)=(replication of virus in organ tumor cells/replication of virus in organ healthy cells).

[0152] For a given organ and virus, the therapeutic index may vary depending on the conditions (e.g.: MOI, culture medium, tumor cell density, temperature, etc., in particular MOI) and time post-infection, and when the therapeutic indexes of two viruses are compared, it is in the same conditions and at the same time post-infection. However, similarly to the oncolytic power, any suitable conditions (see examples below) and time post-infection may be used for comparison (provided that they are identical for the two viruses), as the hierarchy of therapeutic index will generally remain the same for any suitable conditions and time post-infection when the difference in therapeutic index between the two viruses is sufficient. For a given organ and virus, the therapeutic index may generally be determined in vitro 2 to 8 days post-infection of tumor or healthy cells (preferably primary cells) with the virus at an MOI of 10⁻⁵ to 10⁻².

[0153] This therapeutic index is improved by an increase of the replicative activity on tumor cells and/or by a decrease of the replication on corresponding healthy cells (preferably primary cells).

[0154] The term “extracellular-enveloped virus (EEV)-secretion capacity” abbreviated as “EEV-SC” refers for a given tumor, a given virus, given conditions and a given time post-infection to the percentage of EEV particles among all (EEV+IMV) particles and is defined as:

[0155] EEV-SC (tumor, virus, conditions, time post-infection)=number of EEV particles/number of (EEV+IMV) particles For a given tumor and virus, the EEV-SC may vary depending on the conditions (e.g.: MOI, culture medium, tumor cell density, temperature, etc., in particular MOI) and time post-infection, and when the EEV-SC of two viruses are compared, it is in the same conditions and at the same time post-infection. However, similarly to the oncolytic power, any suitable conditions (see examples below) and time post-infection may be used for comparison (provided that they are identical for the two viruses), as the hierarchy of EEV-SC will generally remain the same for any suitable conditions and time post-infection when the difference in EEV-SC between the two viruses is sufficient. For a given organ and virus, the EEV-SC may generally be determined in vitro, 16 to 24 hours post-infection of tumor cells with the virus at an MOI of 10⁻⁴ to 10⁻¹.

[0156] The term “syncytia formation capacity” refers to the capacity of a virus to induce the fusion of an infected cell with neighbouring cells, resulting in the formation of multinucleated, enlarged cells referred to as “syncytia”. The dissemination of the virus is both faster and no longer restricted to cells first infected. This results in the infection of more tumor cells than with a virus that does not induce syncytia formation (Burton et al., 2019, Mol Ther Oncolytics, 15, 131-139, Krabbe et al., 2018, Cancers, 10, 216).

[0157] The term “spreading capacity” refers to the capacity of the virus to disseminate between cells (e.g.: tumor cells) or between tumors (e.g.: spreading from a first tumor at a first location to a second tumor at a distal second location). It is known that the spreading capacity is related to the formation of EEV and/or syncytia: the more EEV and/or syncytia a virus can generate, the higher its capacity to spread. The spreading capacity can be evaluated by various techniques well known to those skilled in the art, including Virus Comet Assay, said assay allowing the evaluation of comet tail formation (e.g.: number of comets, size of the comet tail). In some cases, an increase in the number of comets or size of the comet tail can indicate an increase in the amount of EEV relative to IMV forms of a viral strain. Said evaluation of comet tail formation for a given tumor and virus may generally be determined in vitro, 16 to 24 hours post-infection of tumor cells with the virus at an MOI of 10⁻⁴ to 10⁻¹.

[0158] The terms “viral neutralization rate” and “neutralization rate” are used interchangeably and measure the antiviral antibody-induced inhibition of the virus' oncolytic power. For a given virus, a given tumor, a given poxvirus-specific antibody, given conditions and a given time post-infection, it is defined as:

[0159] NT(virus, tumor, poxvirus-specific antibody, conditions, time post-infection)=EC₅₀ (with poxvirus-specific antibody)/EC₅₀ (without poxvirus-specific antibody), wherein said EC₅₀, or half maximal effective concentration is known by the man of the art as the concentration of a drug (here the chimeric poxvirus) which induces a response halfway between the baseline and maximum, or as the concentration required to obtain 50% effect (here 50% tumor cell viability).

[0160] For given virus, tumor and poxvirus-specific antibody, the neutralization rate may vary depending on the conditions (e.g.: MOI, culture medium, tumor cell density, temperature, etc., in particular MOI) and time post-infection, and when the neutralization rates of two viruses are compared, it is in the same conditions and at the same time post-infection. However, similarly to the oncolytic power, any suitable conditions (see examples below) and time post-infection may be used for comparison (provided that they are identical for the two viruses), as the hierarchy of neutralization rate will generally remain the same for any suitable conditions and time post-infection when the difference in neutralization rate between the two viruses is sufficient. For a given organ and virus, the neutralization rate may generally be determined in vitro, 3 to 5 days post-infection of tumor cells with the virus at an MOI of 3×10⁻⁵ to 3.

[0161] The term “complement-mediated virus neutralization rate” is used to measure the complement induced inhibition of the virus' oncolytic power. For a given virus and given conditions, it is defined as:

[0162] CMV-NT(virus, conditions)=virus titer (active serum)/virus titer (heat-inactivated serum), wherein virus titer is assessed by plaque assays.

[0163] By “active serum”, it is referred to serum that contains active complement components. Serum normally contains active complement components, but these components may be altered and rendered inactive by to long storage or heat. By “heat-inactivated serum”, it is referred to serum that has been submitted to a heating treatment (generally to 56° C. for 30 minutes) that has inactivated the complement components present in the serum.

[0164] Plaques assays are well known in the art and a skilled person will know how to perform them based on common general knowledge. Examples of such assays are disclosed in Materials and Methods of Examples below.

[0165] For a given virus, the complement-mediated virus neutralization rate may vary depending on the conditions (e.g.: MOI, culture medium, cell density, temperature, etc., in particular MOI), and when the complement-mediated virus neutralization rates of two viruses are compared, it is in the same conditions. However, similarly to the oncolytic power, any suitable conditions (see examples below) may be used for comparison (provided that they are identical for the two viruses), as the hierarchy of complement-mediated virus neutralization rate will generally remain the same for any suitable conditions when the difference in complement-mediated virus neutralization rate between the two viruses is sufficient. For a given virus, the complement-mediated virus neutralization rate may be generally determined in vitro, in presence of active or heat-inactivated serum with the virus at a dose of 10⁴ to 10⁸ PFU/mL.

[0166] The term “treatment” (and any form of treatment such as “treating”, “treat”) as used herein encompasses therapy (e.g.: in a subject diagnosed as having the pathological condition), eventually in association with conventional therapeutic modalities. The result of the treatment is to slow down, cure, ameliorate or control the progression of the targeted pathological condition. For example, a subject is successfully treated for a cancer if after administration of a chimeric poxvirus, a variant chimeric poxvirus, a recombinant chimeric poxvirus or a composition thereof as described herein, alone or in combination, the subject shows an observable improvement of its clinical status.

[0167] The term “administering” (or any form of administration, such as “administered”) as used herein refers to the delivery to a subject of a therapeutic agent such as the chimeric poxvirus (variant and/or recombinant) described herein.

[0168] As used herein, the term “proliferative disease” encompasses any disease or condition resulting from uncontrolled cell growth and spread including cancers and some cardiovascular diseases (restenosis that results from the proliferation of the smooth muscle cells of the blood vessel wall, etc.). The term “cancer” may be used interchangeably with any of the terms “tumor”, “tumour”, “malignancy”, “neoplasm”, etc. These terms are meant to include any type of tissue, organ or cell, any stage of malignancy (e.g.: from a pre-lesion to stage IV).

[0169] The term “subject” generally refers to an organism for whom any product and method of the invention is needed or may be beneficial. Typically, the organism is a mammal, particularly a mammal selected from the group consisting of domestic animals, farm animals, sport animals, and primates. Preferably, the subject is a human who has been diagnosed as having or at risk of having a proliferative disease such as a cancer. The terms “subject” and “patients” may be used interchangeably when referring to a human organism and encompasses male and female. The subject to be treated may be a new-born, an infant, a young adult, an adult or an elderly.

[0170] The terms “combination treatment”, “combination therapy”, “combined treatment” or “combinatorial treatment”, may be used interchangeably and refer to a treatment of a subject with a chimeric poxvirus as described herein and at least an additional therapeutic modality. The additional therapeutic modality may be selected from the group consisting of surgery, radiotherapy, chemotherapy, cryotherapy, hormonal therapy, toxin therapy, immunotherapy, cytokine therapy, targeted cancer therapy, gene therapy, photodynamic therapy, transplantation, etc. A combinatorial treatment may include a third or even further therapeutic modality. For combination treatment, it is appreciated that optimal concentration of each component of the combination can be determined by the artisan skilled in the art.

### “Chimeric Poxvirus”, or “Poxvirus Chimera” (Wild-Type)

[0171] The present invention relates to chimeric poxviruses with improved properties, similar to the POXSTG19503 chimeric poxvirus generated by the inventors, which displays enhanced oncolytic properties and therapeutic index in vitro and better spreading capacity in vivo due to improved EEV-secretion and syncytia formation capacities, compared to its parental strains.

[0172] The terms “chimeric poxvirus” and “poxvirus chimera” are interchangeable and used according to their ordinary meaning in virology: they refer to a hybrid poxvirus created by joining nucleic acid fragments from two or more different poxvirus strains.

[0173] The terms “poxvirus”, “poxvirus particle”, “poxvirus vector” and “poxvirus virion” are used interchangeably and are to be understood as meaning a vehicle comprising at least one element of a wild-type poxvirus genome. It is preferred that the poxvirus particle is infectious (i.e.: capable of infecting and entering a host cell or subject). This term encompasses both native as well as genetically modified (e.g.: engineered) poxvirus.

[0174] Poxvirus family is characterized by a 200 kb double-stranded DNA genome that encodes numerous viral enzymes and factors that enable the virus to replicate independently from the host cell machinery. The majority of poxviral particles are intracellular (IMV for intracellular mature virion) with a single lipid envelope and remains in the cytosol of infected cells until lysis. The extracellular forms are enveloped particles with an additional membrane that buds out from the infected cell (e.g.: EEV for extracellular enveloped virus).

[0175] The nucleic acid sequences of poxviruses are composed by a core sequence and two inverted terminal repeats (ITR). The terms “core”, “core region” or “core sequence” are used interchangeably and designate a nucleic acid region of a poxvirus which is the main viral nucleic acid sequence, flanked by the two ITRs. The length of the core region differs from a poxvirus strain to another. The terms “inverted terminal repeats” or “ITR” designate nucleic acid regions which are duplicated and inverted at both 5′ and 3′ ends of the viral genome. ITRs are composed of non-coding repeated patterns (e.g.: short tandem repeat, microsatellites, minisatellites, etc.) at their extremities that can vary between two viruses. A poxvirus comprises two ITRs, one located on the 5′ end and the other located on the 3′ end of the viral nucleic acid sequence, each one being the reverse complement of the other. The length of the ITRs differs from a poxvirus strain to another.

[0176] The term “rabbitpox virus”, “rabbitpox virus particle”, “rabbitpox virus vector” and “rabbitpox virus virion” are used interchangeably. This term encompasses both wild-type, variant, recombinant and recombinant variant rabbitpox viruses.

[0177] The term “rabbitpox virus strain Utrecht” (also designated under “RPX” or “RPXV”) is used according to its common, ordinary meaning and refers to virus strains of the same and similar names and functional fragments and homologs thereof. RPX is accessible via culture collections, like ATCC (e.g.: VR-1591™). The term includes wild-type, variant, recombinant and recombinant variant occurring forms of rabbitpox virus strain Utrecht that maintain Utrecht activity. Their genome preferably has sequence identity to the rabbitpox virus strain Utrecht genome (e.g.: about 97%, 98%, 99% or 100%). The genome of RPX used in the examples comprises SEQ ID NO:2, representing the core region (comprised between nucleotide 1 and 183029) and one of the two ITRs (comprised between nucleotide 183030 and 186491). An RPX comprising SEQ ID NO:2 is particularly preferred.

[0178] The term “cowpox virus” “cowpox virus particle”, “cowpox virus vector” and “cowpox virus virion” are used interchangeably. This term encompasses both wild-type, variant, recombinant and recombinant variant cowpox viruses.

[0179] The term “cowpox virus strain Brighton” (also designated under “CPX” or “CPXV”) is used according to its common, ordinary meaning and refers to virus strains of the same and similar names and functional fragments and homologs thereof. The term includes wild-type, variant, recombinant and recombinant variant occurring forms of cowpox virus strain Brighton or variants thereof that maintain Brighton activity. Their genome preferably has sequence identity to the cowpox virus strain Brighton genome (e.g.: about 97%, 98%, 99% or 100%). The genome of CPX used in the examples comprises SEQ ID NO:3, representing the core region (comprised between nucleotide 1 and 206014) and one of the two ITRs (comprised between nucleotide 206015 and 212521). A CPX comprising SEQ ID NO:3 is particularly preferred.

[0180] The terms “vaccinia virus”, “vaccinia virus particle”, “vaccinia virus vector” and “vaccinia virus virion” (also designated under “VACV” or “VV”) are used interchangeably. Vaccinia viruses are accessible via culture collections, like ATCC (e.g.: VR-1354, VR-2056, VR-2034, VR-2035, VR-2010). These terms encompass both wild-type, variant, recombinant and recombinant variant VACV viruses.

[0181] The term “Copenhagen” or “COP” is used according to its common, ordinary meaning and refers to virus strains of the same and similar names and functional fragments and homologs thereof. The term includes wild-type, variant, recombinant and recombinant variant occurring forms of vaccinia virus strain COP or variants thereof that maintain COP activity. Their genome preferably has sequence identity to the vaccinia virus strain COP genome (e.g.: about 97%, 98%, 99% or 100%). The genome of COP used in the examples comprises SEQ ID NO:4, representing the core region (comprised between nucleotide 1 and 167702) and one of the two ITRs (comprised between nucleotide 167703 and 175860). A COP comprising SEQ ID NO:4 is particularly preferred.

[0182] The term “Wyeth” or “WY” is used according to its common, ordinary meaning and refers to virus strains of the same and similar names and functional fragments and homologs thereof. Said WY is accessible via culture collections, like ATCC (e.g.: VR-1536™). The term includes wild-type, variant, recombinant and recombinant variant occurring forms of vaccinia virus strain Wyeth or variants thereof that maintain Wyeth activity. Their genome preferably has sequence identity to the vaccinia virus strain Wyeth genome (e.g.: about 97%, 98%, 99% or 100%). The genome of WY used in the examples comprises SEQ ID NO:5, representing the core region (comprised between nucleotide 1 and 166358) and one of the two ITRs (comprised between nucleotide 166359 and 182664). A WY comprising SEQ ID NO:5 is particularly preferred.

[0183] The term “Western Reserve” or “WR” is used according to its common, ordinary meaning and refers to virus strains of the same and similar names and functional fragments and homologs thereof. Said WR is accessible via culture collections, like ATCC (e.g.: VR-1354™). The term includes wild-type, variant, recombinant and recombinant variant occurring forms of vaccinia virus strain Western Reserve or variants thereof that maintain Western Reserve activity. Their genome preferably has sequence identity to the vaccinia virus strain Western Reserve genome (e.g.: about 97%, 98%, 99% or 100%). The genome of WR used in the examples comprises SEQ ID NO:6, representing the core region (comprised between nucleotide 1 and 174481) and one of the two ITRs (comprised between nucleotide 174482 and 181419). A WR comprising SEQ ID NO:6 is particularly preferred.

[0184] The term “Modified Vaccinia Virus” or “MVA” is used according to its common, ordinary meaning and refers to virus strains of the same and similar names and functional fragments and homologs thereof. Said MVA is accessible via culture collections, like ATCC (e.g.: VR-1508™). The term includes wild-type, variant, recombinant and recombinant variant occurring forms of vaccinia virus strain MVA or variants thereof that maintain MVA activity. Their genome preferably has sequence identity to the vaccinia virus strain MVA genome (e.g.: about 97%, 98%, 99% or 100%). The genome of MVA used in the examples comprises SEQ ID NO:7, representing the core region (comprised between nucleotide 1 and 159456) and one of the two ITRs (comprised between nucleotide 159457 and 163444). This vaccinia virus strain MVA genome expresses the eGFP gene under the control of the p11k7.5 promoter (MVATG15938) and was constructed and characterized previously (Erbs et al., 2008, Cancer Gene Ther. 2008, 15, 18-28). An MVA comprising SEQ ID NO:7 is particularly preferred.

[0185] The chimeric poxvirus with improved anticancer activity (higher cancer cell killing capacities and better tumor selectivity) may be defined and is defined below by the structure of its genome (nucleic acid features), or by functional features, or as being obtained or obtainable by a specific method of directed evolution as described below, or by combinations of these features.

### Chimeric Poxvirus Defined by Nucleic Acid Features

[0186] The core region (comprised between nucleotide 1 and 175910) and one of the two ITRs (comprised between nucleotide 175911 and 185577) of the chimeric poxvirus POXSTG19503 obtained by the inventors have been sequenced and found to correspond to SEQ ID NO:1.

[0187] In a first aspect, the invention therefore provides a chimeric poxvirus, wherein said chimeric poxvirus comprises a nucleic acid sequence having a sequence identity of at least 96,6%, preferably at least 96,7%, at least 96,8%, at least 96,9%, at least 97%, at least 97,1%, at least 97,2%, at least 97,3%, at least 97,4%, at least 97,5%, at least 97,6%, at least 97,7%, at least 97,8%, at least 97,9%, at least 98%, at least 98,1%, at least 98,2%, at least 98,3%, at least 98,4%, at least 98,5%, at least 98,6%, at least 98,7%, at least 98,8%, at least 98,9%, at least 99%, at least 99,1%, at least 99,2%, at least 99,3%, at least 99,4%, at least 99,5%, at least 99,6%, at least 99,7%, at least 99,8%, at least 99,9%, at least 99,91%, at least 99,92%, at least 99,93%, at least 99,94%, at least 99,95%, at least 99,96%, at least 99,97%, at least 99,98%, at least 99,99%, or even 100% of identity with SEQ ID NO:1.

[0188] In one embodiment, the chimeric poxvirus of the invention is the chimeric poxvirus POXSTG19503 clone 7 deposited at the Collection Nationale de Cultures de Microorganismes (CNCM) on 20 Oct. 2022 under Accession Number CNCM I-5913.

[0189] In the present disclosure, the chimeric poxvirus deposited under Accession Number CNCM I-5913 is also referred as POXSTG19503.

[0190] The chimeric poxvirus of the invention has preferably been obtained from shuffling of nucleic acid sequences of six parental poxvirus strains: Rabbitpox virus strain Utrecht (RPX), Cowpox virus strain Brighton (CPX), Vaccinia virus strain Copenhagen (COP), Vaccinia virus strain Western Reserve (WR), Vaccinia virus strain Wyeth (WY) and Modified Vaccinia virus strain Ankara (MVA), and more preferably comprises nucleic acid sequences derived from at least two parental poxvirus strains. The nucleic acid fragments from at least two parental poxvirus strains contain the essential genes necessary for replication. The chimeric poxvirus can also comprise nucleic acid sequences derived from at least three, at least four, at least five or even the six parental poxvirus strains.

[0191] In particular, the chimeric poxvirus may comprise:
[0192] (a) at least one Rabbitpox virus strain Utrecht (RPX)-derived nucleic acid sequence selected from:
   [0193] a nucleic acid sequence consisting of nucleotides 562 to 4701 of SEQ ID NO:2 or a sequence with at least 99% identity with nucleotides 562 to 4701 of SEQ ID NO:2,
   [0194] a nucleic acid sequence consisting of nucleotides 54042 to 59851 of SEQ ID NO:2 or a sequence with at least 99% identity with nucleotides 54042 to 59851 of SEQ ID NO:2,
   [0195] a nucleic acid sequence consisting of nucleotides 83610 to 88879 of SEQ ID NO:2 or a sequence with at least 99% identity with nucleotides 83610 to 88879 of SEQ ID NO:2,
   [0196] a nucleic acid sequence consisting of nucleotides 127290 to 130589 of SEQ ID NO:2 or a sequence with at least 99% identity with nucleotides 127290 to 130589 of SEQ ID NO:2,
   [0197] a nucleic acid sequence consisting of nucleotides 137520 to 154979 of SEQ ID NO:2 comprising a glutamic acid in position 151 or a sequence with at least 99% identity with nucleotides 137520 to 154979 of SEQ ID NO:2 comprising a glutamic acid in position 151, and
   [0198] a nucleic acid sequence consisting of nucleotides 157002 to 162091 of SEQ ID NO:2 or a sequence with at least 99% identity with nucleotides 157002 to 162091 of SEQ ID NO:2;
[0199] (b) at least one Cowpox virus strain Brighton (CPX)-derived nucleic acid sequence selected from:
   [0200] a nucleic acid sequence consisting of nucleotides 14242 to 51241 of SEQ ID NO:3 or a sequence with at least 99% identity with nucleotides 14242 to 51241 of SEQ ID NO:3, and
   [0201] a nucleic acid sequence consisting of nucleotides 59852 to 72141 of SEQ ID NO:3 or a sequence with at least 99% identity with nucleotides 59852 to 72141 of SEQ ID NO:3;
[0202] (c) at least one Copenhagen (COP)-derived nucleic acid sequence selected from:
   [0203] a nucleic acid sequence consisting of nucleotides 7612 to 8521 of SEQ ID NO:4 or a sequence with at least 99% identity with nucleotides 7612 to 8521 of SEQ ID NO:4;
[0204] (d) at least one Wyeth (WY)-derived nucleic acid sequence selected from:
   [0205] a nucleic acid sequence consisting of 76630 to 78639 of SEQ ID NO:5 or a sequence with at least 99% identity with nucleotides 76630 to 78639 of SEQ ID NO:5,
   [0206] a nucleic acid sequence consisting of 81060 to 83529 of SEQ ID NO:5 or a sequence with at least 99% identity with nucleotides 81060 to 83529 of SEQ ID NO:5,
   [0207] a nucleic acid sequence consisting of 116250 to 118459 of SEQ ID NO:5 or a sequence with at least 99% identity with nucleotides 116250 to 118459 of SEQ ID NO:5,
   [0208] a nucleic acid sequence consisting of 162290 to 164599 of SEQ ID NO:5 or a sequence with at least 99% identity with nucleotides 162290 to 164599 of SEQ ID NO:5,
   [0209] a nucleic acid sequence consisting of 176100 to 179909 of SEQ ID NO:5 or a sequence with at least 99% identity with nucleotides 176100 to 179909 of SEQ ID NO:5, and
   [0210] a nucleic acid sequence consisting of 181920 to 184099 of SEQ ID NO:5 or a sequence with at least 99% identity with nucleotides 181920 to 184099 of SEQ ID NO:5;
[0211] (e) at least one Western Reserve (WR)-derived nucleic acid sequence selected from:
   [0212] a nucleic acid sequence consisting of 169190 to 171579 of SEQ ID NO:6 or a sequence with at least 99% identity with nucleotides 169190 to 171579 of SEQ ID NO:6, and
   [0213] a nucleic acid sequence consisting of 173730 to 176099 of SEQ ID NO:6 or a sequence with at least 99% identity with nucleotides 173730 to 176099 of SEQ ID NO:6;
[0214] (f) at least one Modified Vaccinia Virus Ankara (MVA)-derived nucleic acid sequence selected from:
   [0215] a nucleic acid sequence consisting of 88880 to 90899 of SEQ ID NO:7 or a sequence with at least 99% identity with nucleotides 88880 to 90899 of SEQ ID NO:7,
   [0216] a nucleic acid sequence consisting of 91460 to 93839 of SEQ ID NO:7 or a sequence with at least 99% identity with nucleotides 91460 to 93839 of SEQ ID NO:7,
   [0217] a nucleic acid sequence consisting of 95530 to 116249 of SEQ ID NO:7 or a sequence with at least 99% identity with nucleotides 95530 to 116249 of SEQ ID NO:7,
   [0218] a nucleic acid sequence consisting of 118460 to 127289 of SEQ ID NO:7 or a sequence with at least 99% identity with nucleotides 118460 to 127289 of SEQ ID NO:7, and
   [0219] a nucleic acid sequence consisting of 134800 to 137519 of SEQ ID NO:7 or a sequence with at least 99% identity with nucleotides 134800 to 137519 of SEQ ID NO:7;
   [0220] or
[0221] (g) any combination of (a) to (f).

[0222] In a preferred embodiment of the invention, the chimeric poxviruses comprise a glutamic acid in position 151 (151E) of the protein encoded by the A34R gene. Said amino acid in position 151 in A34R gene is known to be linked with increased production of total progeny virus and extracellular enveloped virus (EEV), a form that can be immune-evasive and with enhanced spreading (Thirunavukarasu et al., 2013, Mol. Ther. Vol 21 no.5, p.1024-1033). The sequence containing the glutamic acid in position 151 of the protein encoded by the A34R gene may be inherited from Rabbitpox virus, preferably from the parental Rabbitpox virus strain Utrecht (RPX). In a further preferred embodiment of the invention, the chimeric poxviruses comprise a valine in position 19 (19V) of the protein encoded by the A34R gene. The sequence containing the valine in position 19 of the protein encoded by the A34R gene may be inherited from the parental Modified Vaccinia Virus Ankara (MVA). In a more preferred embodiment of the invention, the chimeric poxviruses comprise a A34R chimeric gene wherein said A34R chimeric gene is encoding a protein comprising a valine in position 19 (19V) and a glutamic acid in position 151 (151E). The sequence containing the valine in position 19 (19V) and the glutamic acid in position 151 (151E) of the protein encoded by the A34R gene may be inherited from the parental Modified Vaccinia Virus Ankara (MVA) and the parental Rabbitpox virus strain Utrecht (RPX), respectively. In an even more preferred embodiment, the protein encoded by the A34R chimeric gene has at least 85%, preferably at least 90%, and more preferably at least 95%, or has 100% identity with the amino acid sequence of SEQ ID NO:11 and a glutamic acid position in position 151 (151E), and optionally a valine in position 19 (19V).

[0223] In a further preferred embodiment of the invention, the chimeric poxviruses are partially or totally defective in A56R locus. Said deficiency in A56R locus resulting in alteration of the Hemagglutinin encoding-gene is linked with induced syncytia formation in infected cells by avoiding the inhibition of the cell-cell fusion (Turner et al. 2008, Virology 380, 226-233). The said chimeric poxviruses are partially or totally defective in A56R locus, resulting in either: the expression of a non-effective protein encoded by the A56R gene, deletion or mutation of the N-terminus domain (for instance at least 34 amino acids, preferably at least 36 amino acids, at least 38 amino acids, more preferably at least 40 amino acids, at least 42 amino acids, or at least 44 amino acids) of the protein encoded by the A56R gene, mutation in position 34 and/or 103 of the protein encoded by the A56R gene compared to the one expressed by the parental Vaccinia virus strain Copenhagen (COP) sequence. In particular, the chimeric poxviruses may comprise a 44 amino acid residues deletion in N-Terminus domain of the protein expressed by the A56R gene compared to the one expressed by the parental Vaccinia virus strain Copenhagen (COP) sequence. In a more particular embodiment, the chimeric poxviruses may comprise the sequence of the protein encoded by the A56R gene inherited from Rabbitpox virus, preferably from the parental Rabbitpox virus strain Utrecht (RPX). In even more preferred embodiment, the protein encoded by the A56R gene has at least 85%, preferably at least 90%, and more preferably at least 95%, or has 100% identity with the amino acid sequence shown in SEQ ID NO:12.

[0224] Alternatively, or in combination, the above-described chimeric poxviruses according to the invention may comprise a gene encoding a zinc RING finger protein, wherein said gene may be inherited from Rabbitpox virus, preferably from the parental Rabbitpox virus strain Utrecht (RPX).

[0225] Alternatively, or in combination, the above-described chimeric poxviruses according to the invention preferably do not comprise the gene inherited from Rabbitpox virus, preferably from the parental Rabbitpox virus strain Utrecht (RPX), encoding the ankyrin repeat protein.

[0226] Alternatively, or in combination, the above-described chimeric poxviruses according to the invention may preferably do not comprise the gene inherited from Rabbitpox virus, preferably from the parental Rabbitpox virus strain Utrecht (RPX), encoding the chemokine-binding protein.

[0227] Alternatively, or in combination, the above-described chimeric poxviruses according to the invention may preferably:
[0228] comprise a gene encoding a zinc RING finger protein, wherein said gene may be inherited from Rabbitpox virus, preferably from the parental Rabbitpox virus strain Utrecht (RPX), and
[0229] do not comprise the genes inherited from Rabbitpox virus, preferably from the parental Rabbitpox virus strain Utrecht (RPX), encoding the ankyrin repeat protein and the chemokine-binding protein.

### Chimeric Poxvirus Defined by Functional Features

[0230] The chimeric poxvirus POXSTG19503 obtained by the inventors is characterized by several advantageous functional properties, including higher oncolytic power and replication than parental strain COP in several tumor cells (see FIGS. 1 and 4A) and lower replication in healthy cells (preferably primary cells) (see FIG. 4A) and thus higher therapeutic index (see FIG. 4B) than parental strain COP.

[0231] In addition, a TK-variant thereof (POXSTG19508) has been found to display higher oncolytic power than TK-variants of all parental strains (see FIG. 3), higher replication in cancer cells and lower replication in healthy cells (preferably primary cells) and thus higher therapeutic index than TK-COP parental strain (see FIG. 4); expresses higher amounts of transgene than TK-COP parental strain (see FIG. 5), produces higher ratios of EEV than TK-COP parental strain (see FIG. 6), RPX and IHDJ-WT (see FIG. 8), induces syncytia formation (see FIG. 17), resulting in higher number and size of tails in comet assay (see FIG. 7) and better spreading in vivo (see FIG. 10). The TK-variant POXSTG19508 was also found to be less sensitive to poxvirus-specific antibody neutralization (see FIG. 9), less sensitive to complement-mediated virus neutralization (see FIG. 19), more efficient in various animal models in vivo (see FIGS. 11-15) and induced a superior T cell response against tumor (see FIG. 18).

[0232] Similar results have been obtained with a TK-RR-variant (POXSTG19730, data not shown).

[0233] Each of these improved functional features is of interest for improved oncolytic treatments of proliferative diseases, in particular cancer.

Chimeric Poxvirus with High Oncolytic Power

[0234] Therefore, in another aspect, the invention provides a chimeric poxvirus (optionally variant and/or recombinant), wherein, for at least one tumor, the oncolytic power of said chimeric poxvirus is higher than the oncolytic power measured in the same conditions and at the same time post-infection of at least one of the oncolytic parental poxvirus strains Rabbitpox virus strain Utrecht (RPX), Cowpox virus strain Brighton (CPX), Vaccinia virus strain Copenhagen (COP), Vaccinia virus strain Wyeth (WY) and Vaccinia virus strain Western Reserve (WR), wherein for a given tumor, a given virus, given conditions and a given time post-infection, an oncolytic power OP(tumor, virus, conditions, time post-infection) is defined as:
[0235] OP(tumor, virus, conditions, time post-infection)=(100−percentage of surviving tumor cells after infection by virus).

[0236] In a preferred embodiment, for at least one tumor, the oncolytic power of said chimeric poxvirus is higher than the oncolytic power measured in the same conditions and at the same time post-infection of the parental COP or the parental RPX. More preferably, for at least one tumor, the oncolytic power of said chimeric poxvirus is higher than the oncolytic power measured in the same conditions and at the same time post-infection of at least two of the oncolytic parental poxvirus strains RPX, CPX, COP, WY and WR. For instance, for at least one tumor, the oncolytic power of said chimeric poxvirus is higher than the oncolytic powers measured in the same conditions and at the same time post-infection of the parental COP and the parental CPX. In a more preferred embodiment, for at least one tumor, the oncolytic power of said chimeric poxvirus is higher than the oncolytic power measured in the same conditions and at the same time post-infection of at least three, more preferably higher than at least four, and even more preferably higher than each of the five oncolytic parental poxvirus strains RPX, CPX, COP, WY and WR.

[0237] For a given tumor and virus, the oncolytic power may generally be determined in vitro, 3 to 5 days post-infection of tumor cells with the virus at an MOI of 10⁻⁵ to 10⁻².

[0238] In a specific embodiment of this aspect, the invention provides a chimeric poxvirus (optionally variant and/or recombinant), wherein, for at least one tumor cell line selected from A549, MIA Paca-2, U-87-MG, B16F10 and HepG2, the oncolytic power of said chimeric poxvirus is higher than the oncolytic power measured in the same conditions and at the same time post-infection of at least one of the oncolytic parental poxvirus strains RPX, CPX, COP, WY and WR. In a preferred embodiment, for at least one tumor cell line selected from A549, MIA Paca-2, U-87-MG, B16F10 and HepG2, the oncolytic power of said chimeric poxvirus is higher than the oncolytic power measured in the same conditions and at the same time post-infection of the parental COP or RPX. More preferably, for at least one tumor cell line selected from A549, MIA Paca-2, U-87-MG, B16F10 and HepG2, the oncolytic power of said chimeric poxvirus is higher than the oncolytic power measured in the same conditions and at the same time post-infection of at least two of the oncolytic parental poxvirus strains RPX, CPX, COP, WY and WR. For instance, for at least one tumor cell line selected from A549, MIA Paca-2, U-87-MG, B16F10 and HepG2, the oncolytic power of said chimeric poxvirus is higher than the oncolytic powers measured in the same conditions and at the same time post-infection of the parental COP and the parental RPX. In a more preferred embodiment, for at least one tumor cell line selected from A549, MIA Paca-2, U-87-MG, B16F10 and HepG2, the oncolytic power of said chimeric poxvirus is higher than the oncolytic power measured in the same conditions and at the same time post-infection of at least three, more preferably higher than at least four, and even more preferably higher than each of the five oncolytic parental poxvirus strains RPX, CPX, COP, WY and WR.

[0239] In a more specific embodiment of this aspect,
[0240] a) on A549, the difference between the oncolytic power of the chimeric poxvirus and the oncolytic power measured in the same conditions and at the same time post-infection of at least one of the oncolytic parental poxvirus strains RPX, CPX, COP, WY and WR is at least 69%. Preferably, the difference between the oncolytic power of said chimeric poxvirus and the oncolytic power measured in the same conditions and at the same time post-infection of a parental COP(defective in the J2R locus or not) or a parental RPX is at least 69%. More preferably, the difference between the oncolytic power of said chimeric poxvirus and the oncolytic power measured in the same conditions and at the same time post-infection of at least two of the oncolytic parental poxvirus strains RPX, CPX, COP, WY and WR is at least 69%. For instance, the difference between the oncolytic power of said chimeric poxvirus and the oncolytic power measured in the same conditions and at the same time post-infection of a parental COP and a parental RPX is at least 69%. In a more preferred embodiment, the difference between the oncolytic power of said chimeric poxvirus and the oncolytic power measured in the same conditions and at the same time post-infection of at least three, more preferably at least four, and even more preferably all five of the parental oncolytic poxvirus strains RPX, CPX, COP, WY and WR is at least 69%; and/or
[0241] b) on MIA PaCa-2, the difference between the oncolytic power of the chimeric poxvirus and the oncolytic power measured in the same conditions and at the same time post-infection of at least one of the oncolytic parental poxvirus strains RPX, CPX, COP, WY and WR is at least 37%. Preferably, the difference between the oncolytic power of said chimeric poxvirus and the oncolytic power measured in the same conditions and at the same time post-infection of a parental COP(defective in the J2R locus or not) or a parental RPX is at least 37%. More preferably, the difference between the oncolytic power of said chimeric poxvirus and the oncolytic power measured in the same conditions and at the same time post-infection of at least two of the oncolytic parental poxvirus strains RPX, CPX, COP, WY and WR is at least 37%. For instance, the difference between the oncolytic power of said chimeric poxvirus and the oncolytic power measured in the same conditions and at the same time post-infection of a parental COP and a parental RPX is at least 37%. In a more preferred embodiment, the difference between the oncolytic power of said chimeric poxvirus and the oncolytic power measured in the same conditions and at the same time post-infection of at least three, more preferably at least four, and even more preferably all five of the parental oncolytic poxvirus strains RPX, CPX, COP, WY and WR is at least 37%; and/or
[0242] c) on U-87 MG, the difference between the oncolytic power of the chimeric poxvirus and the oncolytic power measured in the same conditions and at the same time post-infection of at least one of the oncolytic parental poxvirus strains RPX, CPX, COP, WY and WR is at least 37%. Preferably, the difference between the oncolytic power of said chimeric poxvirus and the oncolytic power measured in the same conditions and at the same time post-infection of a parental COP or a parental RPX is at least 37%. More preferably, the difference between the oncolytic power of said chimeric poxvirus and the oncolytic power measured in the same conditions and at the same time post-infection of at least two of the oncolytic parental poxvirus strains RPX, CPX, COP, WY and WR is at least 37%. For instance, the difference between the oncolytic power of said chimeric poxvirus and the oncolytic power measured in the same conditions and at the same time post-infection of a parental COP and a parental RPX is at least 37%. In a more preferred embodiment, the difference between the oncolytic power of said chimeric poxvirus and the oncolytic power measured in the same conditions and at the same time post-infection of at least three, more preferably at least four, and even more preferably all five of the parental oncolytic poxvirus strains RPX, CPX, COP, WY and WR is at least 37%; and/or
[0243] d) on B16F10, the difference between the oncolytic power of the chimeric poxvirus and the oncolytic power measured in the same conditions and at the same time post-infection of at least one of the oncolytic parental poxvirus strains RPX, CPX, COP, WY and WR is at least 20%. Preferably, the difference between the oncolytic power of said chimeric poxvirus and the oncolytic power measured in the same conditions and at the same time post-infection of a parental COP or a parental RPX is at least 20%. More preferably, the difference between the oncolytic power of said chimeric poxvirus and the oncolytic power measured in the same conditions and at the same time post-infection of at least two of the oncolytic parental poxvirus strains RPX, CPX, COP, WY and WR is at least 20%. For instance, the difference between the oncolytic power of said chimeric poxvirus and the oncolytic power measured in the same conditions and at the same time post-infection of a parental COP and a parental RPX is at least 20%. In a more preferred embodiment, the difference between the oncolytic power of said chimeric poxvirus and the oncolytic power measured in the same conditions and at the same time post-infection of at least three, more preferably at least four, and even more preferably all five of the parental oncolytic poxvirus strains RPX, CPX, COP, WY and WR is at least 20%; and/or
[0244] e) on HepG2, the difference between the oncolytic power of the chimeric poxvirus and the oncolytic power measured in the same conditions and at the same time post-infection of at least one of the oncolytic parental poxvirus strains RPX, CPX, COP, WY and WR is at least 49%. Preferably, the difference between the oncolytic power of said chimeric poxvirus and the oncolytic power measured in the same conditions and at the same time post-infection of a parental COP or a parental RPX is at least 49%. More preferably, the difference between the oncolytic power of said chimeric poxvirus and the oncolytic power measured in the same conditions and at the same time post-infection of at least two of the oncolytic parental poxvirus strains RPX, CPX, COP, WY and WR is at least 49%. For instance, the difference between the oncolytic power of said chimeric poxvirus and the oncolytic power measured in the same conditions and at the same time post-infection of a parental COP and a parental RPX is at least 49%. In a more preferred embodiment, the difference between the oncolytic power of said chimeric poxvirus and the oncolytic power measured in the same conditions and at the same time post-infection of at least three, more preferably at least four, and even more preferably all five of the parental oncolytic poxvirus strains RPX, CPX, COP, WY and WR is at least 49%.

[0245] Preferably, in this embodiment, the oncolytic power is evaluated 5 days post infection and at a MOI of 10⁵ on A549, U-87-MG and HepG2, at an MOI of 10⁴ on MIA PaCa-2, and at a MOI of 10⁻³ on B16F10. More preferably, in this embodiment, the tumor cell lines are cultured at 37° C., 5% CO₂, in Dulbecco's Modified Eagle Medium (DMEM) with 10% of Fetal Calf Serum (FCS).

Chimeric Poxvirus with Low Replication in Healthy Cells (Preferably Primary Cells)

[0246] In another aspect, the invention provides a chimeric poxvirus (optionally variant and/or recombinant), wherein for at least one healthy cell (preferably primary cell), the viral replication in the healthy cell of said chimeric poxvirus is lower than that of at least one of the five oncolytic parental poxvirus strains Rabbitpox virus strain Utrecht (RPX), Cowpox virus strain Brighton (CPX), Vaccinia virus strain Copenhagen (COP), Vaccinia virus strain Wyeth (WY) and Vaccinia virus strain Western Reserve (WR). Preferably, for at least one healthy cell (preferably primary cell), the viral replication in the healthy cell of said chimeric poxvirus is lower than that of the parental Vaccinia virus strain Copenhagen (COP). More preferably, for at least one healthy cell (preferably primary cell), the viral replication in the healthy cell (preferably primary cell) of said chimeric poxvirus is lower than that of at least two, preferably at least three, more preferably at least four, and even more preferably each of the five oncolytic parental poxvirus strains Rabbitpox virus strain Utrecht (RPX), Cowpox virus strain Brighton (CPX), Vaccinia virus strain Copenhagen (COP), Vaccinia virus strain Wyeth (WY) and Vaccinia virus strain Western Reserve (WR).

[0247] For a given tumor or healthy cell (preferably primary cell), the viral replication may generally be determined in vitro, 2 to 8 days post-infection of tumor or healthy cells (preferably primary cells) with the virus at an MOI of 10⁻⁵ to 10⁻².

[0248] In a specific embodiment of this aspect, the invention provides a chimeric poxvirus (optionally variant and/or recombinant), wherein for at least one healthy cell (preferably primary cell) selected from skin cells and hepatocytes, the viral replication in the healthy cell of said chimeric poxvirus is lower than that of at least one of the five oncolytic parental poxvirus strains RPX, CPX, COP, WY and WR. Preferably, for at least one healthy cell (preferably primary cell) selected from skin cells and hepatocytes, the viral replication in the healthy cell of said chimeric poxvirus is lower than that of the parental COP. More preferably, for at least one healthy cell (preferably primary cell) selected from skin cells and hepatocytes, the viral replication in the healthy cell (preferably primary cell) of said chimeric poxvirus is lower than that of at least two, preferably at least three, more preferably at least four, and even more preferably each of the five oncolytic parental poxvirus strains RPX, CPX, COP, WY and WR.

[0249] In a more specific embodiment of this aspect, the viral replication of said chimeric poxvirus is:
[0250] a) at least 1.9 times lower in at least one healthy cell line (preferably primary cell line) selected from skin cells and hepatocytes than that of at least one of the five oncolytic parental poxvirus strains (optionally variant and/or recombinant) RPX, CPX, COP, WY and WR, preferably than that of the parental COP, more preferably than that of at least two, more preferably at least three, more preferably at least four, and even more preferably each of the five oncolytic parental poxvirus strains (optionally variant and/or recombinant) RPX, CPX, COP, WY and WR; and/or
[0251] b) at least 5.1 times lower in hepatocytes than that of at least one of the five oncolytic parental poxvirus strains (optionally variant and/or recombinant) RPX, CPX, COP, WY and WR, preferably than that of the parental COP, more preferably than that of at least two, more preferably at least three, more preferably at least four, and even more preferably each of the five oncolytic parental poxvirus strains (optionally variant and/or recombinant) RPX, CPX, COP, WY and WR.

[0252] Preferably, in this embodiment, the viral replication is evaluated in vitro 3 days post infection and at a MOI of 10⁻⁴ on HepG2, or 7 days post infection and at 10⁵ PFU on human skin model. More preferably, in this embodiment, the tumor cell lines are cultured at 37° C., 5% CO₂, in Dulbecco's Modified Eagle Medium (DMEM) with 10% of Fetal Calf Serum (FCS).

Chimeric Poxvirus with High Therapeutic Index

[0253] In another aspect, the invention provides a chimeric poxvirus (optionally variant and/or recombinant), wherein, for at least one organ, the therapeutic index of said chimeric poxvirus is higher than the therapeutic index measured in the same conditions and at the same time post-infection of at least one of the five oncolytic parental poxvirus strain(s) Rabbitpox virus strain Utrecht (RPX), Cowpox virus strain Brighton (CPX), Vaccinia virus strain Copenhagen (COP), Vaccinia virus strain Wyeth (WY) and Vaccinia virus strain Western Reserve (WR) wherein for a given organ, a given tumor, a given virus, given conditions and a given time post-infection, the therapeutic index TI(organ, tumor, virus, conditions, time post-infection) is defined as:
[0254] TI(organ, tumor, virus, conditions, time post-infection)=(replication of virus in organ tumor cells/replication of virus in organ healthy cells).

[0255] In a preferred embodiment, for at least one organ, the therapeutic index of said chimeric poxvirus is higher than the therapeutic index measured in the same conditions and at the same time post-infection of the parental Vaccinia virus strain Copenhagen (COP). More preferably, for at least one organ, the therapeutic index of said chimeric poxvirus is higher than the therapeutic index measured in the same conditions and at the same time post-infection of at least two of, more preferably at least three of, more preferably at least four of, and even more preferably each of the five oncolytic parental poxvirus strains Rabbitpox virus strain Utrecht (RPX), Cowpox virus strain Brighton (CPX), Vaccinia virus strain Copenhagen (COP), Vaccinia virus strain Wyeth (WY) and Vaccinia virus strain Western Reserve (WR).

[0256] For a given organ and virus, the therapeutic index may generally be determined in vitro, 2 to 8 days post-infection of tumor or healthy cells (preferably primary cells) with the virus at an MOI of 10⁵ to 10⁻².

[0257] The therapeutic index is related to both the oncolytic power and the replication in healthy cells (preferably primary cells). A higher therapeutic index may be due to higher oncolytic power, lower replications in in healthy cells (preferably primary cells) or both.

[0258] In a specific embodiment of this aspect, the hepatic therapeutic index of said chimeric poxvirus (optionally variant and/or recombinant) is higher than the hepatic therapeutic index measured in the same conditions and at the same time post-infection of at least one of the parental oncolytic poxvirus strains RPX, CPX, COP, WY and WR (optionally variant and/or recombinant), wherein for a given virus, an hepatic therapeutic index TI(liver, HepG2, virus, conditions, time post-infection) is defined as:
[0259] TI(liver, HepG2, virus, conditions, time post-infection)=(replication of virus in HepG2 tumor cells/replication of virus in healthy hepatocytes).

[0260] Preferably, the hepatic therapeutic index of said chimeric poxvirus (optionally variant and/or recombinant) is higher than the hepatic therapeutic index measured in the same conditions and at the same time post-infection of the parental COP. In a more preferred embodiment, the hepatic therapeutic index of said chimeric poxvirus is higher than the hepatic therapeutic index measured in the same conditions and at the same time post-infection of at least two, preferably at least three, more preferably at least four, and even more preferably all five of the parental oncolytic poxvirus strains RPX, CPX, COP, WY and WR.

[0261] Preferably, the hepatic therapeutic index of said chimeric poxvirus is at least 5 times higher than, more preferably at least 10 times higher than, more preferably at least 15 times higher than, even more preferably at least 20 times higher than the hepatic therapeutic index measured in the same conditions and at the same time post-infection of at least one of the parental oncolytic poxvirus strains RPX, CPX, COP, WY and WR (optionally variant and/or recombinant), preferably than the hepatic therapeutic index measured in the same conditions and at the same time post-infection of the parental COP, more preferably higher than the hepatic therapeutic index measured in the same conditions and at the same time post-infection of at least two, preferably at least three, more preferably at least four, and even more preferably all five of the parental oncolytic poxvirus strains RPX, CPX, COP, WY and WR.

[0262] More preferably, in this embodiment, the hepatic therapeutic index is measured in vitro in a setting in which the chimeric poxvirus is added respectively to the HepG2 tumor cells at a MOI of 10⁻⁵ and to the healthy hepatocytes (preferably primary hepatocytes) at a MOI of 10⁻⁴, and the replication of the chimeric poxvirus in the HepG2 tumor cells and in the healthy hepatocytes is measured 3 days post infection. Even more preferably, in this embodiment, the HepG2 tumor cell lines are cultured at 37° C., 5% CO₂, in Dulbecco's Modified Eagle Medium (DMEM) with 10% of Fetal Calf Serum (FCS), and the healthy hepatocytes are cultured at 37° C., 5% CO₂, in basal hepatic cell medium (BIOPREDICS catalogue reference MIL600) and additives for hepatocytes culture medium (BIOPREDICS catalogue reference ADD222C).

Chimeric Poxvirus with High EEV-Secretion Capacity

[0263] Poxviruses have two distinct infectious virus particles which can initiate infection: the intracellular mature virus (IMV) and the extracellular enveloped virus (EEV). The EEV is typically produced early after infection of a susceptible cell and is released from the cell before lysis. Therefore, the EEV form spreads rapidly and systemically within the infected host and evades immune-mediated clearance from the blood. Kirn et al. (2008, Cancer Res. 68 (7): 2071-5) compared the oncolytic potential of low versus high EEV-producing strains of vaccinia. Significantly improved antitumor effects were observed with EEV-enhanced vaccinia strains, which displayed improved spreading within tumors after systemic delivery. Moreover, the EEV-enhanced strains also displayed a greater ability to spread between injected and noninjected distant tumors through the blood. Importantly, EEV-enhanced strains also displayed reduced clearance by circulating neutralizing antibody.

[0264] In another aspect, the invention provides a chimeric poxvirus (optionally variant and/or recombinant), wherein for at least one producer cell (preferably a tumor cell), the extracellular-enveloped virus (EEV)-secretion capacity (SC) (abbreviated as EEV-SC) of said chimeric poxvirus is higher than the EEV-SC measured in the same conditions and at the same time post-infection of at least one of the six parental poxvirus strains Rabbitpox virus strain Utrecht (RPX), Cowpox virus strain Brighton (CPX), Vaccinia virus strain Copenhagen (COP), Vaccinia virus strain Wyeth (WY), Vaccinia virus strain Western Reserve (WR) and Modified Vaccinia virus strain Ankara (MVA), wherein for a given virus, a given producer cell, given conditions and a given time after viral infection, said EEV-SC is the ratio of extracellular enveloped virus (EEV) to the total forms of the virus (extracellular enveloped virus (EEV) and intracellular mature virus (IMV) form of the virus), defined as:
[0265] EEV-SC (virus, producer cell, conditions, time post-infection)=number of EEV particles/number of (EEV+IMV) particles.

[0266] In a preferred embodiment, the invention provides a chimeric poxvirus (optionally variant and/or recombinant), wherein for at least one producer cell (preferably a tumor cell), the EEV-SC of said chimeric poxvirus is higher than the EEV-SC measured in the same conditions and at the same time post-infection of the parental Vaccinia virus strain Copenhagen (COP) or the parental Rabbitpox virus strain Utrecht (RPX). More preferably, for at least one producer cell (preferably a tumor cell), the EEV-SC of said chimeric poxvirus is higher than the EEV-SC measured in the same conditions and at the same time post-infection of at least two of the six parental poxvirus strains Rabbitpox virus strain Utrecht (RPX), Cowpox virus strain Brighton (CPX), Vaccinia virus strain Copenhagen (COP), Vaccinia virus strain Wyeth (WY), Vaccinia virus strain Western Reserve (WR) and Modified Vaccinia virus strain Ankara (MVA). For instance, for at least one producer cell (preferably a tumor cell), the EEV-SC of said chimeric poxvirus is higher than the EEV-SCs measured in the same conditions and at the same time post-infection of the parental Vaccinia virus strain Copenhagen (COP) and the parental Rabbitpox virus strain Utrecht (RPX). In a more preferred embodiment, for at least one producer cell (preferably a tumor cell), the EEV-SC of said chimeric poxvirus is higher than the EEV-SC measured in the same conditions and at the same time post-infection of at least three, preferably at least four, more preferably at least five, and even more preferably each of the six parental poxvirus strains Rabbitpox virus strain Utrecht (RPX), Cowpox virus strain Brighton (CPX), Vaccinia virus strain Copenhagen (COP), Vaccinia virus strain Wyeth (WY), Vaccinia virus strain Western Reserve (WR) and Modified Vaccinia virus strain Ankara (MVA).

[0267] Vaccinia virus strain IHD-J is known as a high EEV producer strain of vaccinia virus. Therefore, alternatively, or in combination, for at least one producer cell (preferably a tumor cell), the EEV-SC of said chimeric poxvirus (optionally variant and/or recombinant) is higher than the EEV-SC measured in the same conditions and at the same time post-infection of Vaccinia virus strain IHD-J. For a given tumor and virus, the EEV-SC may generally be determined in vitro, 16 to 24 hours post-infection of tumor cells with the virus at an MOI of 10⁻⁴ to 10⁻¹.

[0268] In a more specific embodiment of this aspect, the EEV-SC of the chimeric poxvirus is:
[0269] a) at least 4%, preferably at least 5%, more preferably at least 6%, 16 hours post-infection of the said chimeric poxvirus on A549 tumor cell line, at an MOI of 10⁻² to 1, preferably at an MOI of 0.1; and/or
[0270] b) at least 5%, at least 6%, at least 7%, at least 8%, preferably at least 9%, more preferably at least 10%, even more preferably at least 11%, 24 hours post-infection of the said chimeric poxvirus on A549 tumor cell line, at an MOI of 10⁻² to 1, preferably at an MOI of 0.1.

[0271] In a more specific embodiment of this aspect, the EEV-SC of the chimeric poxvirus is:
[0272] a) comprised between 4% and 9%, more preferably between 6% and 8%, 16 hours post-infection of the said chimeric poxvirus on A549 tumor cell line at an MOI of 10⁻² to 1, preferably at an MOI of 0.1; and/or
[0273] b) comprised between 5% and 15%, more preferably between 10% and 13%, 24 hours post-infection of the said chimeric poxvirus on A549 tumor cell line at an MOI of 10⁻² to 1, preferably at an MOI of 0.1.
   Chimeric Poxvirus with High Spreading Capacity

[0274] Preferably, for at least one tumor, the spreading capacity of said chimeric poxvirus (optionally variant and/or recombinant) is higher than the spreading capacity measured in the same conditions and at the same time post-infection of at least one of the six parental poxvirus strains Rabbitpox virus strain Utrecht (RPX), Cowpox virus strain Brighton (CPX), Vaccinia virus strain Copenhagen (COP), Vaccinia virus strain Wyeth (WY), Vaccinia virus strain Western Reserve (WR) and Modified Vaccinia virus strain Ankara (MVA), wherein for a given virus, producer cell, conditions and time post-infection, the spreading capacity is defined as the capacity of the virus to disseminate between cells (e.g. tumor cells) or between tumors (e.g. spreading from an injected tumor to a distal tumor). In a preferred embodiment, for at least one tumor, the spreading capacity of said chimeric poxvirus is higher than the spreading capacity measured in the same conditions and at the same time post-infection of the parental COP or the parental RPX. More preferably, for at least one tumor, the spreading capacity of said chimeric poxvirus is higher than the spreading capacity measured in the same conditions and at the same time post-infection of at least two of the six parental poxvirus strains RPX, CPX, COP, WY, WR and MVA. For instance, for at least one tumor, the spreading capacity of said chimeric poxvirus is higher than the spreading capacities measured in the same conditions and at the same time post-infection of the parental COP and the parental RPX. In a more preferred embodiment, for at least one tumor, the spreading capacity of said chimeric poxvirus is higher than the spreading capacity of at least three, preferably at least four, more preferably at least five or even more preferably each of the six parental poxvirus strains RPX, CPX, COP, WY, WR and MVA.

[0275] For a given tumor and virus, the spreading capacity may generally be determined in vitro, 16 to 24 hours post-infection of tumor cells with the virus at an MOI of 10⁻⁴ to 10⁻¹.

Chimeric Poxvirus with Low Neutralization Rate in the Presence of Poxvirus-Specific Antibody

[0276] In another aspect, the invention provides a chimeric poxvirus (optionally variant and/or recombinant), wherein, for at least one poxvirus-specific antibody and tumor, the neutralization rate of said chimeric poxvirus is lower than the neutralization rate measured in the same conditions and at the same time post-infection of at least one of the six parental poxvirus strains Rabbitpox virus strain Utrecht (RPX), Cowpox virus strain Brighton (CPX), Vaccinia virus strain Copenhagen (COP), Vaccinia virus strain Wyeth (WY), Vaccinia virus strain Western Reserve (WR) and Modified Vaccinia virus strain Ankara (MVA), wherein for a given virus, a given tumor, a given poxvirus-specific antibody, given conditions and a given time post-infection, the neutralization rate (NT(virus, tumor, conditions, time post-infection)) measures the antibody-induced inhibition of the virus' oncolytic power and is defined as:
[0277] NT(virus, tumor, Poxvirus-specific antibody, conditions, time post-infection)=EC50 (with poxvirus-specific antibody)/EC50 (without poxvirus-specific antibody).

[0278] In a preferred embodiment, for at least one poxvirus-specific antibody and tumor, the neutralization rate of said chimeric poxvirus is lower than the neutralization rate measured in the same conditions and at the same time post-infection of the parental COP. More preferably, for at least one poxvirus-specific antibody and tumor, the neutralization rate of said chimeric poxvirus is lower than the neutralization rate of at least two, preferably at least three, more preferably at least four, more preferably at least five, and even more preferably each of the six parental poxvirus strains RPX, CPX, COP, WY, WR and MVA.

[0279] For a given tumor and virus, the viral neutralization rate may generally be determined in vitro, 3 to 5 days post-infection of tumor cells with the virus at an MOI of 3×10⁻⁵ to 3. If the anti-poxvirus antibodies are from human serum, said serum may be diluted 10 to 1000 times.

Chimeric Poxvirus with Low Complement-Mediated Virus Neutralization Rate

[0280] In another aspect, the invention provides a chimeric poxvirus, wherein the complement-mediated virus neutralization rate of said chimeric poxvirus is lower than the complement-mediated virus neutralization rate measured in the same conditions of at least one of the six parental poxvirus strains Rabbitpox virus strain Utrecht (RPX), Cowpox virus strain Brighton (CPX), Vaccinia virus strain Copenhagen (COP), Vaccinia virus strain Wyeth (WY), Vaccinia virus strain Western Reserve (WR) and Modified Vaccinia virus strain Ankara (MVA), wherein for a given virus and given conditions, the complement-mediated virus neutralization rate (CMV-NT(virus, conditions)) measures the complement induced inhibition of the virus' oncolytic power and is defined as:
[0281] CMV-NT(virus, conditions)=virus titer (active serum)/virus titer (heat-inactivated serum).

[0282] In a preferred embodiment, the complement-mediated virus neutralization rate of said chimeric poxvirus is lower than the complement-mediated virus neutralization rate measured in the same conditions of the parental COP. More preferably, the complement-mediated virus neutralization rate of said chimeric poxvirus is lower than the complement-mediated virus neutralization rate of at least two, preferably at least three, more preferably at least four, more preferably at least five, and even more preferably each of the six parental poxvirus strains RPX, CPX, COP, WY, WR and MVA.

[0283] For a given virus, the complement-mediated virus neutralization rate may be generally determined in vitro, in presence of human serum (active or heat-inactivated) with the virus at a dose of 10⁴ to 10⁸ PFU/mL.

Chimeric Poxvirus with High Syncytia Formation Capacity

[0284] In another aspect, the invention provides a chimeric poxvirus, wherein for at least one producer cell (preferably a tumor cell), the syncytia formation capacity of said chimeric poxvirus is higher than the syncytia formation capacity measured in the same conditions and at the same time post-infection of at least one of the six parental poxvirus strains Rabbitpox virus strain Utrecht (RPX), Cowpox virus strain Brighton (CPX), Vaccinia virus strain Copenhagen (COP), Vaccinia virus strain Wyeth (WY), Vaccinia virus strain Western Reserve (WR) and Modified Vaccinia virus strain Ankara (MVA).

[0285] In a preferred embodiment, the invention provides a chimeric poxvirus wherein for at least one producer cell (preferably a tumor cell), the syncytia formation capacity of said chimeric poxvirus is higher than the syncytia formation capacity measured in the same conditions and at the same time post-infection of the parental Vaccinia virus strain Copenhagen (COP). More preferably, for at least one producer cell (preferably a tumor cell), the syncytia formation capacity of said chimeric poxvirus is higher than the syncytia formation capacity measured in the same conditions and at the same time post-infection of at least two of the six parental poxvirus strains Rabbitpox virus strain Utrecht (RPX), Cowpox virus strain Brighton (CPX), Vaccinia virus strain Copenhagen (COP), Vaccinia virus strain Wyeth (WY), Vaccinia virus strain Western Reserve (WR) and Modified Vaccinia virus strain Ankara (MVA). For instance, in a preferred embodiment, for at least one producer cell (preferably a tumor cell), the syncytia formation capacity of said chimeric poxvirus is higher than the syncytia formation capacity measured in the same conditions and at the same time post-infection of at least two, preferably at least three, more preferably at least four, at least five, and more preferably each of the six parental poxvirus strains Rabbitpox virus strain Utrecht (RPX), Cowpox virus strain Brighton (CPX), Vaccinia virus strain Copenhagen (COP), Vaccinia virus strain Wyeth (WY), Vaccinia virus strain Western Reserve (WR) and Modified Vaccinia virus strain Ankara (MVA).

[0286] For a given tumor and virus, the syncytia formation capacity may generally be determined in vitro, 16 to 96 hours post-infection of tumor cells with the virus at an MOI of 10⁵ to 1.

### Chimeric Poxvirus Combining Several Functional Features of Interest

[0287] Chimeric poxviruses according to the invention that combine several of the functional features described above are particularly preferred. The chimeric poxvirus (optionally variant and/or recombinant) of the invention may thus comprise any combination of functional features described herein.

[0288] The chimeric poxvirus of the invention may in particular comprise any combination of:
[0289] a high oncolytic power as disclosed in the corresponding section above (preferably compared to parental Vaccinia virus strain Copenhagen (COP), to parental Rabbitpox virus strain Utrecht (RPX), to parental COP and RPX, or to all parental poxvirus strains);
[0290] a low viral replication in healthy cells (preferably primary cells) as disclosed in the corresponding section above (preferably compared to parental Vaccinia virus strain Copenhagen (COP) or to all parental poxvirus strains);
[0291] a high EEV-SC, a high syncytia formation capacity, a high spreading capacity, a low neutralization rate in the presence of poxvirus-specific antibody and/or a low complement-mediated virus neutralization rate as disclosed in the corresponding section above (preferably compared to parental Vaccinia virus strain Copenhagen (COP), to parental Rabbitpox virus strain Utrecht (RPX), to Vaccinia virus strain IHD-J or to all parental poxvirus strains).

[0292] In particular, the chimeric poxvirus of the invention may comprise:
[0293] a high oncolytic power as disclosed in the corresponding section above and a low viral replication in healthy cells (preferably primary cells) as disclosed in the corresponding section above;
[0294] a high oncolytic power as disclosed in the corresponding section above and (a high EEV-SC, a high syncytia formation capacity, a high spreading capacity, a low neutralization rate in the presence of poxvirus-specific antibody and/or a low complement-mediated virus neutralization rate as disclosed in the corresponding section above);
[0295] a low viral replication in healthy cells (preferably primary cells) as disclosed in the corresponding section above and (a high EEV-SC, a high syncytia formation capacity, a high spreading capacity, a low neutralization rate in the presence of poxvirus-specific antibody and/or a low complement-mediated virus neutralization rate as disclosed in the corresponding section above); or
[0296] a high oncolytic power as disclosed in the corresponding section above, a low viral replication in healthy cells (preferably primary cells) as disclosed in the corresponding section above and (a high EEV-SC, a high syncytia formation capacity, a high spreading capacity, a low neutralization rate in the presence of poxvirus-specific antibody and/or a low complement-mediated virus neutralization rate as disclosed in the corresponding section above).

[0297] A particularly preferred chimeric poxvirus according to the invention comprises the following functional features:
[0298] for at least one tumor, the oncolytic power of said chimeric poxvirus is higher than the oncolytic power measured in the same conditions and at the same time post-infection of the parental Vaccinia virus strain Copenhagen (COP) or the parental Rabbitpox virus strain Utrecht (RPX);
[0299] for at least one healthy cell (preferably primary cell), the viral replication in the healthy cell (preferably primary cell) of said chimeric poxvirus is lower than that of the parental Vaccinia virus strain Copenhagen (COP);
[0300] for at least one producer cell (preferably a tumor cell), the EEV-SC of said chimeric poxvirus is higher than the EEV-SC measured in the same conditions and at the same time post-infection of the parental Rabbitpox virus strain Utrecht (RPX) or the Vaccinia virus strain IHD-J;
[0301] optionally, for at least one poxvirus-specific antibody and tumor, the neutralization rate of said chimeric poxvirus is lower than the neutralization rate measured in the same conditions and at the same time post-infection of the parental Vaccinia virus strain Copenhagen (COP);
[0302] optionally, the complement-mediated virus neutralization rate of said chimeric poxvirus is lower than the complement-mediated virus neutralization rate measured in the same conditions of the parental Vaccinia virus strain Copenhagen (COP); and
[0303] optionally, for at least one producer cell (preferably a tumor cell), the syncytia formation capacity of said chimeric poxvirus is higher than the syncytia formation capacity measured in the same conditions and at the same time post-infection of the parental Vaccinia virus strain Copenhagen (COP).

[0304] A further particularly preferred chimeric poxvirus according to the invention comprises the following functional features:
[0305] for at least one tumor, the oncolytic power of said chimeric poxvirus is higher than the oncolytic power measured in the same conditions and at the same time post-infection of the parental Vaccinia virus strain Copenhagen (COP) or the parental Rabbitpox virus strain Utrecht (RPX);
[0306] for at least one healthy cell (preferably primary cell), the viral replication in the healthy cell (preferably primary cell) of said chimeric poxvirus is lower than that of the parental Vaccinia virus strain Copenhagen (COP);
[0307] for at least one producer cell (preferably a tumor cell), the syncytia formation capacity of said chimeric poxvirus is higher than the syncytia formation capacity measured in the same conditions and at the same time post-infection of the parental Vaccinia virus strain Copenhagen (COP);
[0308] optionally, for at least one producer cell (preferably a tumor cell), the EEV-SC of said chimeric poxvirus is higher than the EEV-SC measured in the same conditions and at the same time post-infection of the parental Rabbitpox virus strain Utrecht (RPX) or the Vaccinia virus strain IHD-J;
[0309] optionally, for at least one poxvirus-specific antibody and tumor, the neutralization rate of said chimeric poxvirus is lower than the neutralization rate measured in the same conditions and at the same time post-infection of the parental Vaccinia virus strain Copenhagen (COP); and
[0310] optionally, the complement-mediated virus neutralization rate of said chimeric poxvirus is lower than the complement-mediated virus neutralization rate measured in the same conditions of the parental Vaccinia virus strain Copenhagen (COP).

[0311] A more particularly preferred chimeric poxvirus according to the invention comprises the following functional features:
[0312] for at least one tumor, the oncolytic power of said chimeric poxvirus is higher than the oncolytic power measured in the same conditions and at the same time post-infection of the parental Vaccinia virus strain Copenhagen (COP) or the parental Rabbitpox virus strain Utrecht (RPX);
[0313] for at least one healthy cell (preferably primary cell), the viral replication in the healthy cell (preferably primary cell) of said chimeric poxvirus is lower than that of the parental Vaccinia virus strain Copenhagen (COP);
[0314] for at least one producer cell (preferably a tumor cell), the EEV-SC of said chimeric poxvirus is higher than the EEV-SC measured in the same conditions and at the same time post-infection of the parental Rabbitpox virus strain Utrecht (RPX) or the Vaccinia virus strain IHD-J;
[0315] for at least one producer cell (preferably a tumor cell), the syncytia formation capacity of said chimeric poxvirus is higher than the syncytia formation capacity measured in the same conditions and at the same time post-infection of the parental Vaccinia virus strain Copenhagen (COP);
[0316] optionally, for at least one poxvirus-specific antibody and tumor, the neutralization rate of said chimeric poxvirus is lower than the neutralization rate measured in the same conditions and at the same time post-infection of the parental Vaccinia virus strain Copenhagen (COP); and
[0317] optionally, the complement-mediated virus neutralization rate of said chimeric poxvirus is lower than the complement-mediated virus neutralization rate measured in the same conditions of the parental Vaccinia virus strain Copenhagen (COP).

[0318] The chimeric poxvirus of the invention may alternatively comprise a high therapeutic index as disclosed in the corresponding section above and (a high EEV-SC, a high syncytia formation capacity, a high spreading capacity, a low neutralization rate in the presence of poxvirus-specific antibody and/or a low complement-mediated virus neutralization rate as disclosed in the corresponding section above). A particularly preferred chimeric poxvirus according to the invention comprises the following functional features:
[0319] for at least one organ, the therapeutic index of said chimeric poxvirus is higher than the therapeutic index measured in the same conditions and at the same time post-infection of the parental Vaccinia virus strain Copenhagen (COP);
[0320] for at least one producer cell (preferably a tumor cell), the EEV-SC of said chimeric poxvirus is higher than the EEV-SC measured in the same conditions and at the same time post-infection of the parental Rabbitpox virus strain Utrecht (RPX) or the Vaccinia virus strain IHD-J;
[0321] optionally, for at least one poxvirus-specific antibody and tumor, the neutralization rate of said chimeric poxvirus is lower than the neutralization rate measured in the same conditions and at the same time post-infection of the parental Vaccinia virus strain Copenhagen (COP);
[0322] optionally, the complement-mediated virus neutralization rate of said chimeric poxvirus is lower than the complement-mediated virus neutralization rate measured in the same conditions of the parental Vaccinia virus strain Copenhagen (COP); and
[0323] optionally, for at least one producer cell (preferably a tumor cell), the syncytia formation capacity of said chimeric poxvirus is higher than the syncytia formation capacity measured in the same conditions and at the same time post-infection of the parental Vaccinia virus strain Copenhagen (COP).

[0324] A further particularly preferred chimeric poxvirus according to the invention comprises the following functional features:
[0325] for at least one organ, the therapeutic index of said chimeric poxvirus is higher than the therapeutic index measured in the same conditions and at the same time post-infection of the parental Vaccinia virus strain Copenhagen (COP);
[0326] for at least one producer cell (preferably a tumor cell), the syncytia formation capacity of said chimeric poxvirus is higher than the syncytia formation capacity measured in the same conditions and at the same time post-infection of the parental Vaccinia virus strain Copenhagen (COP);
[0327] optionally, for at least one producer cell (preferably a tumor cell), the EEV-SC of said chimeric poxvirus is higher than the EEV-SC measured in the same conditions and at the same time post-infection of the parental Rabbitpox virus strain Utrecht (RPX) or the Vaccinia virus strain IHD-J;
[0328] optionally, for at least one poxvirus-specific antibody and tumor, the neutralization rate of said chimeric poxvirus is lower than the neutralization rate measured in the same conditions and at the same time post-infection of the parental Vaccinia virus strain Copenhagen (COP); and
[0329] optionally, the complement-mediated virus neutralization rate of said chimeric poxvirus is lower than the complement-mediated virus neutralization rate measured in the same conditions of the parental Vaccinia virus strain Copenhagen (COP).

[0330] A more particularly preferred chimeric poxvirus according to the invention comprises the following functional features:
[0331] for at least one organ, the therapeutic index of said chimeric poxvirus is higher than the therapeutic index measured in the same conditions and at the same time post-infection of the parental Vaccinia virus strain Copenhagen (COP);
[0332] for at least one producer cell (preferably a tumor cell), the EEV-SC of said chimeric poxvirus is higher than the EEV-SC measured in the same conditions and at the same time post-infection of the parental Rabbitpox virus strain Utrecht (RPX) or the Vaccinia virus strain IHD-J;
[0333] for at least one producer cell (preferably a tumor cell), the syncytia formation capacity of said chimeric poxvirus is higher than the syncytia formation capacity measured in the same conditions and at the same time post-infection of the parental Vaccinia virus strain Copenhagen (COP);
[0334] optionally, for at least one poxvirus-specific antibody and tumor, the neutralization rate of said chimeric poxvirus is lower than the neutralization rate measured in the same conditions and at the same time post-infection of the parental Vaccinia virus strain Copenhagen (COP); and
[0335] optionally, the complement-mediated virus neutralization rate of said chimeric poxvirus is lower than the complement-mediated virus neutralization rate measured in the same conditions of the parental Vaccinia virus strain Copenhagen (COP).
   Chimeric Poxvirus Obtained or Obtainable by the Method of Directed Evolution for Selecting a Chimeric Poxvirus with High Oncolytic Power

[0336] In another aspect, the invention provides a chimeric poxvirus, wherein said chimeric poxvirus has been or may be obtained by any embodiment of the method of directed evolution described below.

Chimeric Poxvirus Combining Nucleic Acid, Functional, and/or Method Features

[0337] As explained above, the chimeric poxvirus of the invention may comprise any combination of nucleic acid, functional and/or method features described herein.

[0338] In particular, a preferred chimeric poxvirus of the invention may comprise:
[0339] a nucleic acid sequence having a sequence identity of at least 96,6% (or any other identity percentage disclosed above in the corresponding section) with SEQ ID NO:1; and
[0340] one of the following functional features or combinations of functional features:
   [0341] a) a high oncolytic power as disclosed in the corresponding section above (preferably compared to parental Vaccinia virus strain Copenhagen (COP), to parental Rabbitpox virus strain Utrecht (RPX) or to all parental poxvirus strains);
   [0342] b) a low viral replication in healthy cells (preferably primary cells) as disclosed in the corresponding section above (preferably compared to parental Vaccinia virus strain Copenhagen (COP) or to all parental poxvirus strains);
   [0343] c) a high EEV-SC, a high syncytia formation capacity, a high spreading capacity, a low neutralization rate in the presence of poxvirus-specific antibody and/or a low complement-mediated virus neutralization rate as disclosed in the corresponding section above (preferably compared to parental Vaccinia virus strain Copenhagen (COP), to parental Rabbitpox virus strain Utrecht (RPX), to Vaccinia virus strain IHD-J or to all parental poxvirus strains);
   [0344] d) a) and b);
   [0345] e) a) and c);
   [0346] f) b) and c); and
   [0347] g) a), b) and c).

[0348] In particular, a chimeric poxvirus of the invention may comprise:
[0349] a nucleic acid sequence having a sequence identity of at least 96,6% (or any other identity percentage disclosed above in the corresponding section) with SEQ ID NO:1; and
[0350] one of the following functional features or combinations of functional features:
   [0351] a) for at least one tumor, the oncolytic power of said chimeric poxvirus is higher than the oncolytic power measured in the same conditions and at the same time post-infection of the parental Vaccinia virus strain Copenhagen (COP) or the parental Rabbitpox virus strain Utrecht (RPX);
   [0352] b) for at least one healthy cell (preferably primary cell), the viral replication in the healthy cell (preferably primary cell) of said chimeric poxvirus is lower than that of the parental Vaccinia virus strain Copenhagen (COP);
   [0353] c) for at least one producer cell (preferably a tumor cell), the EEV-SC of said chimeric poxvirus is higher than the EEV-SC measured in the same conditions and at the same time post-infection of the parental Rabbitpox virus strain Utrecht (RPX) or the Vaccinia virus strain IHD-J;
   [0354] d) for at least one poxvirus-specific antibody and tumor, the neutralization rate of said chimeric poxvirus is lower than the neutralization rate measured in the same conditions and at the same time post-infection of the parental Vaccinia virus strain Copenhagen (COP);
   [0355] e) the complement-mediated virus neutralization rate of said chimeric poxvirus is lower than the complement-mediated virus neutralization rate measured in the same conditions of the parental Vaccinia virus strain Copenhagen (COP);
   [0356] f) for at least one producer cell (preferably a tumor cell), the syncytia formation capacity of said chimeric poxvirus is higher than the syncytia formation capacity measured in the same conditions and at the same time post-infection of the parental Vaccinia virus strain Copenhagen (COP).
   [0357] g) a) and b);
   [0358] h) a) and c);
   [0359] i) a) and d);
   [0360] j) a) and e);
   [0361] k) a) and f);
   [0362] I) b) and c);
   [0363] m) b) and d);
   [0364] n) b) and e);
   [0365] o) b) and f);
   [0366] p) c) and d);
   [0367] q) c) and e);
   [0368] r) c) and f);
   [0369] s) a), b) and c);
   [0370] t) a), b) and d);
   [0371] u) a), b) and e);
   [0372] v) a), b) and f);
   [0373] w) a), c) and d);
   [0374] x) a), c) and f);
   [0375] y) b), c) and d);
   [0376] z) b), c) and f);
   [0377] aa) a), b), c) and d);
   [0378] bb) a), b), c) and e);
   [0379] cc) a), b), c) and f); and
   [0380] dd) any combination thereof.

[0381] For all the above embodiments combining a sequence identity of at least 96,6% (or any other identity percentage disclosed above in the corresponding section) with SEQ ID NO:1 and one or more functional features, the poxvirus of the invention may further comprises nucleic acid sequences derived from at least two, at least 3, at least 4, at least 5 or all 6 parental poxvirus strains Rabbitpox virus strain Utrecht (RPX), Cowpox virus strain Brighton (CPX), Vaccinia virus strain Copenhagen (COP), Vaccinia virus strain Western Reserve (WR), Vaccinia virus strain Wyeth (WY) and Modified Vaccinia virus strain Ankara (MVA), preferably one or more of the specific fragments of the parental poxvirus strains defined in the section above relating to the chimeric poxvirus defined by nucleic acid features. For all the above embodiments combining nucleic acid features and one or more functional features, the poxvirus of the invention may further have been obtained by one of the methods of directed evolution disclosed in the next section.

### Chimeric Poxvirus of Strain POXSTG19503 Having Accession Number CNCM-I-5913 Comprising Functional Features

[0382] According to a particular embodiment, a chimeric poxvirus of the invention is strain POXSTG19503 having the accession number CNCM-I-5913 and may comprise one of the following functional features or combinations of functional features:
[0383] a) a high oncolytic power as disclosed in the corresponding section above (preferably compared to parental Vaccinia virus strain Copenhagen (COP), to parental Rabbitpox virus strain Utrecht (RPX) or to all parental poxvirus strains);
[0384] b) a low viral replication in healthy cells (preferably primary cells) as disclosed in the corresponding section above (preferably compared to parental Vaccinia virus strain Copenhagen (COP) or to all parental poxvirus strains);
[0385] c) a high EEV-SC, a high syncytia formation capacity, a high spreading capacity, a low neutralization rate in the presence of poxvirus-specific antibody and/or a low complement-mediated virus neutralization rate as disclosed in the corresponding section above (preferably compared to parental Vaccinia virus strain Copenhagen (COP), to parental Rabbitpox virus strain Utrecht (RPX), to Vaccinia virus strain IHD-J or to all parental poxvirus strains);
[0386] d) a) and b);
[0387] e) a) and c);
[0388] f) b) and c); and
[0389] g) a), b) and c).

[0390] In particular, a preferred chimeric poxvirus of the invention is strain POXSTG19503 having the accession number CNCM-I-5913 and may comprise one of the following functional features or combinations of functional features:
[0391] a) for at least one tumor, the oncolytic power of said chimeric poxvirus is higher than the oncolytic power measured in the same conditions and at the same time post-infection of the parental Vaccinia virus strain Copenhagen (COP) or the parental Rabbitpox virus strain Utrecht (RPX);
[0392] b) for at least one healthy cell (preferably primary cell), the viral replication in the healthy cell (preferably primary cell) of said chimeric poxvirus is lower than that of the parental Vaccinia virus strain Copenhagen (COP);
[0393] c) for at least one producer cell (preferably a tumor cell), the EEV-SC of said chimeric poxvirus is higher than the EEV-SC measured in the same conditions and at the same time post-infection of the parental Rabbitpox virus strain Utrecht (RPX) or the Vaccinia virus strain IHD-J;
[0394] d) for at least one poxvirus-specific antibody and tumor, the neutralization rate of said chimeric poxvirus is lower than the neutralization rate measured in the same conditions and at the same time post-infection of the parental Vaccinia virus strain Copenhagen (COP);
[0395] e) the complement-mediated virus neutralization rate of said chimeric poxvirus is lower than the complement-mediated virus neutralization rate measured in the same conditions of the parental Vaccinia virus strain Copenhagen (COP);
[0396] f) for at least one producer cell (preferably a tumor cell), the syncytia formation capacity of said chimeric poxvirus is higher than the syncytia formation capacity measured in the same conditions and at the same time post-infection of the parental Vaccinia virus strain Copenhagen (COP).
[0397] g) a) and b);
[0398] h) a) and c);
[0399] i) a) and d);
[0400] j) a) and e);
[0401] k) a) and f);
[0402] l) b) and c);
[0403] m) b) and d);
[0404] n) b) and e);
[0405] o) b) and f);
[0406] p) c) and d);
[0407] q) c) and e);
[0408] r) c) and f);
[0409] s) a), b) and c);
[0410] t) a), b) and d);
[0411] u) a), b) and e);
[0412] v) a), b) and f);
[0413] w) a), c) and d);
[0414] x) a), c) and f);
[0415] y) b), c) and d);
[0416] z) b), c) and f);
[0417] aa) a), b), c) and d);
[0418] bb) a), b), c) and e);
[0419] cc) a), b), c) and f); and
[0420] dd) any combination thereof.

[0421] For all the above embodiments combining a chimeric poxvirus of strain POXSTG19703 having accession number CNCM-I-5913 and one or more functional features, the poxvirus of the invention may further comprises nucleic acid sequences derived from at least two, at least 3, at least 4, at least 5 or all 6 parental poxvirus strains Rabbitpox virus strain Utrecht (RPX), Cowpox virus strain Brighton (CPX), Vaccinia virus strain Copenhagen (COP), Vaccinia virus strain Western Reserve (WR), Vaccinia virus strain Wyeth (WY) and Modified Vaccinia virus strain Ankara (MVA), preferably one or more of the specific fragments of the parental poxvirus strains defined in the section above relating to the chimeric poxvirus defined by the strain POXSTG19503 having accession number CNCM-I-5913. For all the above embodiments combining a chimeric poxvirus of strain POXSTG19503 having accession number CNCM-I-5913 and one or more functional features, the poxvirus of the invention may further have been obtained by one of the methods of directed evolution method disclosed in the following section.

Method of Directed Evolution for Selecting a Chimeric Poxvirus with High Oncolytic Power

[0422] In another aspect, the invention provides a method of directed evolution for obtaining a chimeric poxvirus with high oncolytic power, said method comprising:
[0423] (i) infecting a first tumor cell line with a plurality of parental poxvirus strains, wherein said tumor cell line is permissive for each parental poxvirus strain, so as to obtain a first infected tumor cell line;
[0424] (ii) amplifying said parental poxvirus strains on said first infected tumor cell line of step (i) during at least 12h (preferably at least 24h) and at most 3 days, so as to obtain one or more distinct chimeric poxviruses through homologous genomic recombination between at least two of said parental poxvirus strains in supernatant;
[0425] (iii) collecting the supernatant at the end of step (ii) containing the one or more distinct chimeric poxvirus(es);
[0426] (iv) infecting a second tumor cell line with the one or more distinct chimeric poxvirus(es) of the supernatant of step (iii), wherein said second tumor cell line is permissive for each parental poxvirus strain of steps (i) and (ii), so as to obtain a second infected tumor cell line;
[0427] (vₐ) amplifying the one or more distinct chimeric poxvirus(es) of step (iv) on said second infected tumor cell line of step (iv) during preferably at least 12 h and at most 24 h and then collecting the supernatant;
[0428] (vi) selecting one or more distinct chimeric poxvirus(es) of step (vₐ) having, for at least one third tumor cell line, an oncolytic power higher than the oncolytic power measured in the same conditions and at the same time post-infection of at least one, preferably several, and more preferably all the parental oncolytic poxvirus strains in the first tumor cell line of step (i) and/or in the second tumor cell line of step (iv), wherein for a given tumor, a given virus, given conditions and a given time post-infection, an oncolytic power OP(tumor, virus, conditions, time post-infection) is defined as:
[0429] OP(tumor, virus, conditions, time post-infection)=(100-percentage of surviving tumor cells after infection by virus).

[0430] More particularly, said method of directed evolution comprises the following steps:
[0431] (i) infecting a first tumor cell line with a plurality of parental poxvirus strains, wherein said tumor cell line is permissive for each parental poxvirus strain, so as to obtain a first infected tumor cell line;
[0432] (ii) amplifying said parental poxvirus strains on said first infected tumor cell line of step (i) during at least 12h (preferably at least 24h) and at most 3 days, so as to obtain one or more distinct chimeric poxviruses through homologous genomic recombination between at least two of said parental poxvirus strains in supernatant;
[0433] (iii′) collecting the supernatant at the end of step (ii) containing the one or more distinct chimeric poxvirus(es), and performing a 5 to 20-fold dilution series so as to obtain at least two diluted supernatants each containing one or more chimeric poxvirus(es);
[0434] (iv′) infecting at least two samples of a second tumor cell line with the one or more distinct chimeric poxvirus(es) of each of the diluted supernatants of step (iii′), wherein said second tumor cell line is permissive for each parental poxvirus strain of steps (i) and (ii), so as to obtain at least two samples of the second infected tumor cell line;
[0435] (v′ₐ) amplifying the one or more distinct chimeric poxvirus(es) of each of the at least two samples of the second infected tumor cell line of step (iv′) on the second infected tumor cell line of step (iv′) during preferably at least 12 h and at most 24h;
[0436] (v′_{b}) collecting the supernatant from the sample of infected second tumor cell line infected with the less diluted supernatant that shows no sign of cytopathic effect, and performing a 5 to 20-fold dilution series;
[0437] (v′_{c}) repeating steps (iv), (v′ₐ) and (v′_{b}) until one or more distinct chimeric poxvirus(es) meeting the selection criteria of step (vi) is obtained; and
[0438] (vi) selecting one or more distinct chimeric poxvirus(es) of step (v′_{c}) having, for at least one third tumor cell line, an oncolytic power higher than the oncolytic power measured in the same conditions and at the same time post-infection of at least one, preferably several, and more preferably higher than all the parental oncolytic poxvirus strains in the first tumor cell line of step (i) or in the second tumor cell line of step (iv′), wherein for a given tumor, a given virus, given conditions and a given time post-infection an oncolytic power OP(tumor, virus, conditions, time post-infection) is defined as:
[0439] OP(tumor, virus, conditions, time post-infection)=(100-percentage of surviving tumor cells after infection by virus).

[0440] Even more particularly, said method of directed evolution comprises the following steps:
[0441] i) infecting a first tumor cell line with a plurality of parental poxvirus strains, wherein said tumor cell line is permissive for each parental poxvirus strain, so as to obtain a first infected tumor cell line;
[0442] (ii) amplifying said parental poxvirus strains on said first infected tumor cell line of step (i) during at least 12h (preferably at least 24h) and at most 3 days, so as to obtain one or more distinct chimeric poxviruses through homologous genomic recombination between at least two of said parental poxvirus strains;
[0443] (iii″ₐ) collecting both cells and supernatant at the end of step (ii) containing one or more distinct chimeric poxvirus(es);
[0444] (iii″_{b}) infecting a second tumor cell line with both cells and supernatant containing one or more distinct chimeric poxvirus(es) of step (iii″ₐ), wherein said second tumor cell line is permissive for each parental poxvirus strain of steps (i) and (ii), so as to obtain a second infected tumor cell line;
[0445] (iii″_{c}) amplifying one or more distinct chimeric poxvirus(es) of step (iii″_{b}) on said second infected tumor cell line of step (iii″_{b}) during at least 48h (preferably at least 72h) and at most 3 days;
[0446] (iii″_{d}) collecting a fraction of the cells and supernatant containing one or more distinct chimeric poxvirus(es) of step (iii″_{c});
[0447] (iii″ₑ) repeating steps (iii″_{b}), (iii″_{c}) and (iii″d) at least one time;
[0448] (iii″′f) collecting the supernatant at the end of step (iii″ₑ) containing one or more distinct chimeric poxvirus(es), and performing a 5 to 20-fold dilution series so as to obtain at least two diluted supernatants;
[0449] (iv″) infecting at least two samples of a third tumor cell line with the one or more distinct chimeric poxvirus(es) of each of the diluted supernatants of step (iii″), wherein said third tumor cell line is permissive for each parental poxvirus strain of steps (i) and (ii) so as to obtain at least two samples of the third infected tumor cell line;
[0450] (v″ₐ) amplifying the one or more distinct chimeric poxvirus(es) of each of the at least two samples of the third infected tumor cell line of step (iv″) on a third infected tumor cell line of step (iv″) during at least 12 h and at most 24h;
[0451] (v″_{b}) collecting the supernatant from the sample of third infected tumor cell line infected with the less diluted supernatant that shows no sign of cytopathic effect, and performing a 5 to 20-fold dilution series;
[0452] (v″_{c}) repeating steps (iv″), (v″ₐ) and (v″_{b}) until one or more distinct chimeric poxvirus(es) meeting the selection criteria of step (vi) is obtained; and
[0453] (vi) selecting one or more distinct chimeric poxvirus(es) of step (v″_{c}) having, for at least one fourth tumor cell line, an oncolytic power higher than the oncolytic power measured in the same conditions and at the same time post-infection of at least one, preferably several, and more preferably all the parental oncolytic poxvirus strains in the tumor cell line of steps (iv″), wherein for a given tumor, a given virus, given conditions and a given time post-infection, an oncolytic power OP(tumor, virus, conditions, time post-infection) is defined as:
[0454] OP(tumor, virus, conditions, time post-infection)=(100−percentage of surviving tumor cells after infection by virus).

[0455] In said method of directed evolution, the different parental poxvirus strains are pooled, and the blend is used to infect a first permissive tumor cell line. Several passages are then made in a second permissive tumor cell line. In this general manner, the method facilitates recombination between the different poxviral strains and the generation of new chimeric poxviruses. A selection is then effectuated between the new generated chimeric poxviruses according to their oncolytic power, and optionally other functional features.

[0456] Preferably, in the above method of directed evolution, at least two, preferably at least three, preferably at least four, preferably at least five, preferably at least six, such as 2 to 50, 3 to 40, 4 to 30, 5 to 25, 6 to 20, 6 to 19, 6 to 18, 6 to 17, or 6 to 16 different parental poxvirus strains are used for infecting a permissive tumor cell of step (i).

[0457] When no more than 16 distinct poxviruses are used as parental poxvirus strains in first step (i), they are preferably selected in the group consisting of Rabbitpox virus strain Utrecht (RPX), Cowpox virus strain Brighton (CPX), Vaccinia virus strain Copenhagen (COP), Vaccinia virus strain Western Reserve (WR), Vaccinia virus strain Wyeth (WY), Modified Vaccinia virus strain Ankara (MVA), Raccoonpox virus strain Herman (RCN), ORF virus strain NZ2 (ORF), Pseudocowpox strain TJS (PCP), Bovine Papular stomatitis virus strain Illinois 721 (BPS), Myxoma virus strain Lausanne (MYX), Squirrelpox virus strain Kilham (SQF), Fowlpox virus strain FP9 (FPV), Swinepox virus strain Kasza (SPV), Yaba-like disease virus strain Davis (YLD), and Cotia virus strain SP An 232 (CTV). Preferably, said parental poxvirus strains are used at a dose comprised between 1.5×10³ PFU (plaque-forming unit) and 1.5×10⁶ PFU, more preferably between 1×10⁴ PFU and 1×10⁶ PFU, and even more preferably between 1.5×10⁴ PFU and 1.5×10⁻⁵ PFU.

[0458] In a preferred embodiment, said parental poxvirus strains in first step (i) are orthopoxvirus strains, preferably selected (when no more than 6 distinct orthopoxviruses are used as parental poxvirus strains) in the group consisting of Rabbitpox virus strain Utrecht (RPX), Cowpox virus strain Brighton (CPX), Vaccinia virus strain Copenhagen (COP), Vaccinia virus strain Western Reserve (WR), Vaccinia virus strain Wyeth (WY) and Modified Vaccinia virus strain Ankara (MVA). Preferably, said parental orthopoxvirus strains are used at a dose comprised between 1.5×10³ PFU and 1.5×10⁶ PFU, more preferably between 1×10⁴ PFU and 1×10⁶ PFU, and even more preferably between 1.5×10⁴ PFU and 1.5×10⁻⁵ PFU.

[0459] Preferably, in the above method of directed evolution, said permissive tumor cell lines used for generating the chimeric poxvirus of the invention are mammalian cells, said cells being permissive to poxvirus infection and replication.

[0460] In the above methods, all the tumor cell line(s) are permissive for the replication of the parental poxvirus strains used in step (i). Permissive tumor cell lines used as first, second, third and optionally fourth tumor cell line in the above methods can be the same or different, preferably the same tumor cell line is used in all steps of the method. Examples of permissive tumor cell lines are A549, CAL-33, HepG2, HCT116, Hela, SK-MEL-1, PANC-1, Hs746T, SK-OV-3 and CV-1. In a preferred embodiment, the first, second, third and optionally fourth permissive tumor cell lines used for generating chimeric poxviruses are A549.

[0461] Steps (i), (iv), (iv′), (iii″_{b}) and (iv″) comprise the infection of permissive tumor cell lines with several distinct poxvirus strains, and the amplification of said poxvirus strains. In such case, genetic exchange, also called “shuffling”, may happen between various strains, leading to the generation of chimeric poxviruses. The use of a permissive tumor cell line results in a high frequency of genetic exchanges between the different viral strains, including point mutations and recombination events. As a result, the amplification step allows the enrichment of the generated chimeric poxviruses increased oncolytic power in the tumor cell line used for amplification.

[0462] In a preferred embodiment, the methods of directed evolution according to the invention include infecting A549 tumor cell line with Rabbitpox virus strain Utrecht (RPX), Cowpox virus strain Brighton (CPX), Vaccinia virus strain Copenhagen (COP), Vaccinia virus strain Western Reserve (WR), Vaccinia virus strain Wyeth (WY), Modified Vaccinia virus strain Ankara (MVA), Raccoonpox virus strain Herman (RCN), ORF virus strain NZ2 (ORF), Pseudocowpox strain TJS (PCP), Bovine Papular stomatitis virus strain Illinois 721 (BPS), Myxoma virus strain Lausanne (MYX), Squirrelpox virus strain Kilham (SQF), Fowlpox virus strain FP9 (FPV), Swinepox virus strain Kasza (SPV), Yaba-like disease virus strain Davis (YLD) and Cotia virus strain SP An 232 (CTV) in step (i)). More preferably, step (i) of said method includes infecting A549 tumor cell line with 1.5×10⁴ PFU of Rabbitpox virus strain Utrecht (RPX), 1.5×10⁴ PFU of Cowpox virus strain Brighton (CPX), 1.5×10⁴ PFU of Vaccinia virus strain Copenhagen (COP), 1.5×10⁴ PFU of Vaccinia virus strain Western Reserve (WR), 1.5×10⁴ PFU of Vaccinia virus strain Wyeth (WY), 1.5×10⁴ PFU of Modified Vaccinia virus strain Ankara (MVA), 1.5×10⁴ PFU of Raccoonpox virus strain Herman (RCN), 1.5×10⁴ PFU of ORF virus strain NZ2 (ORF), 1.5×10⁴ PFU of Pseudocowpox strain TJS (PCP), 1.5×10⁴ PFU of Bovine Papular stomatitis virus strain Illinois 721 (BPS), 1.5×10⁴ PFU of Myxoma virus strain Lausanne (MYX), 1.5×10⁴ PFU of Squirrelpox virus strain Kilham (SQF), 1.5×10⁴ PFU of Fowlpox virus strain FP9 (FPV), 1.5×10⁴ PFU of Swinepox virus strain Kasza (SPV), 1.5×10⁴ PFU of Yaba-like disease virus strain Davis (YLD), and 1.5×10⁴ PFU of Cotia virus strain SP An 232 (CTV). The above embodiments correspond to the method used in the examples for generated chimeric poxvirus POXSTG19503.

[0463] However, in the case of POXSTG19503, only orthopoxvirus parental strains recombined with each other. As a result, only orthopoxvirus parental strains may be used. Therefore, in another preferred embodiment, the method of directed evolution includes infecting A549 tumor cell line with Rabbitpox virus strain Utrecht (RPX), Cowpox virus strain Brighton (CPX), Vaccinia virus strain Copenhagen (COP), Vaccinia virus strain Western Reserve (WR), Vaccinia virus strain Wyeth (WY) and Modified Vaccinia virus strain Ankara (MVA) in step (i) and infecting A549 tumor cell lines with one or more distinct chimeric poxvirus(es) in step (iii). More preferably, step (i) of said method includes infecting A549 tumor cell line with 1.5×10⁴ PFU of Rabbitpox virus strain Utrecht (RPX), 1.5×10⁴ PFU of Cowpox virus strain Brighton (CPX), 1.5×10⁴ PFU of Vaccinia virus strain Copenhagen (COP), 1.5×10⁴ PFU of Vaccinia virus strain Western Reserve (WR), 1.5×10⁴ PFU of Vaccinia virus strain Wyeth (WY) and 1.5×10⁴ PFU of Modified Vaccinia virus strain Ankara (MVA).

[0464] Steps (iii), (vₐ), (iii′), (v′_{b}), (v′_{c}), (iii″ₐ), (ii″ₐ), (iii″), (v″_{b}) and (v″_{c}) comprise the collection of the supernatant comprising one or more oncolytic chimeric poxviruses. In steps (vₐ), (v′_{b}), (v′_{c}), (v″_{b}) and (v″_{c}), the supernatant is collected at 12 to 24 hours post-infection. At this time post-infection, the tumor permissive cell line has generally not yet been lysed by the one or more oncolytic chimeric poxviruses, so that the one or more oncolytic chimeric poxviruses present in the collected supernatant should mainly comprise EEV particles. The specific collection of the supernatant at 12 to 24 hours post-infection in steps (vₐ), (v′_{b}), (v′_{c}), (v″_{b}) and (v″_{c}) thus ensures that not only highly oncolytic chimeric poxviruses are selected, but also that chimeric poxviruses with high EEV-SC (and as a result high spreading capacity and low neutralization rate, as a high EEV-SC is correlated to a high spreading capacity and a low neutralization rate) are selected. Repeating several times (infection by supernatant, amplification during 12 to 24 hours and collection of supernatant), as in step (v′_{c}) or (v″_{c}), thus enriches in highly oncolytic chimeric poxviruses with high EEV-SC (and as a result high spreading capacity and low neutralization rate).

[0465] In steps (iii′), (v′_{b}), (v′_{c}), (iii″_{f}), (v″_{b}) and (v″_{c}), a 5 to 20-fold dilution series of the collected supernatant is performed, i.e.: part of the supernatant is diluted 5-20 times, part of this 5-20 diluted supernatant is diluted 5-20 times resulting in a 25-400 diluted supernatant. The number of serial dilutions is preferably comprised between 1 and 5, more preferably between 2 and 4, such as 2, 3 and 4. Preferably, the fold dilution between each serial dilution is comprised between 6 and 18, more preferably between 7 and 15, more preferably between 8 and 12. A 10-fold dilution series may notably be used. Preferably, the dilution factor between the undiluted supernatant and the most diluted supernatant in the dilution series is comprised between 100 and 10000, preferably between 200 and 8000, between 300 and 6000, between 400 and 4000, between 500 and 2000, or between 750 and 1500.

[0466] In one embodiment, step (iii″ₑ) is repeated between 1 and 30 times, preferably between 1 and 25 times, more preferably between 1 and 20 times, more preferably between 1 and 15 times, more preferably between 1 and 10 times, more preferably between 1 and 5 times, and even more preferably between 1 and 3 times.

[0467] In one embodiment, steps (v′_{c}) and (v″_{c}) are repeated between 1 and 200 times, preferably between 2 and 150 times, more preferably between 3 and 100 times, more preferably between 4 and 50 times, more preferably between 5 and 40 times, more preferably between 6 and 30 times, more preferably between 6 and 20 times, more preferably between 7 and 15 times, more preferably between 8 and 12 times.

[0468] In any one of the above methods of directed evolution, the selection of step (vi) of the one or more distinct chimeric poxvirus(es) may comprise obtaining viral clones. In a preferred embodiment, said obtention of viral clones may be the result of dilution, isolation and amplification of the one or more distinct chimeric poxvirus(es) of step (v). Alternatively, or in combination, the selection of step (vi) may comprise testing the oncolytic power of the distinct chimeric poxvirus(es) of step (v) on one or more tumor cell lines.

[0469] In one embodiment, the method of directed evolution further comprises the use of at least one mutagenic agent in one or more of step(s) (i), (ii), (iii), (iii′), (iii″ₐ), (iii″_{b}), (iii″_{c}), (iii″ₐ), (iii″ₑ), (iii″_{f}), (iv), (iv), (iv″), (v), (vₐ), (v′_{b}), (vc), (v″ₐ), (v″_{b}), (v″_{c}) and (vi) in order to increase the genetic diversity. For instance, said mutagenic agents may be selected from physical, chemical and biological agents. More preferably, said physical agents are selected in the group consisting of ultraviolet radiations, ionizing radiations and radioactive decays, said chemical agents are selected in the group consisting of urea, nitrosourea, reactive oxygen species, deaminating agents, polycyclic aromatic hydrocarbon, alkylating agents, aromatic amines, alkaloid, bromine, sodium azide and benzene, and said biological agents are selected in the group consisting of DNA base analogues and transposons. Other physic, chemical and biological mutagenic agents known by the skilled person may be used in the context of the invention.

### Variant Chimeric Poxvirus

[0470] Various oncolytic poxvirus variants with improved properties (in particular lower replication in healthy cells (preferably primary cells) and thus higher therapeutic index) are known in the art, and variants of the chimeric poxvirus of the invention with similar alterations in one or more viral gene(s) may thus be advantageous for use in the treatment of proliferative diseases, such as cancer.

[0471] In another aspect, the present invention thus relates to a variant chimeric poxvirus, i.e. a chimeric poxvirus according to the invention that has been modified by altering one or more poxviral gene(s).

[0472] In an embodiment, the modification(s) of the variant chimeric poxvirus of the present invention preferably lead(s) to the synthesis of a defective protein unable to ensure the activity of the protein produced under normal conditions by the unmodified gene (or lack of synthesis). Exemplary modifications are disclosed in the literature with the goal of altering viral genes involved in DNA metabolism, host virulence, IFN pathway (e.g.: Guse et al., 2011, Expert Opinion Biol. Ther.11 (5): 595-608) and the like. Modifications for altering a viral locus encompass deletion, mutation and/or substitution of one or more nucleotide(s) (contiguous or not) within the viral gene or its regulatory elements. Modification(s) can be made by a number of ways known to those skilled in the art using conventional techniques.

[0473] In the context of the invention, the variant chimeric poxvirus can be rendered defective for a particular locus by a number of ways including substitution(s), deletion(s) and/or insertions of one or more nucleotide(s) present in this locus. For example, insertion of a polynucleotide in the locus may disrupt the open reading frame (ORF) encoded by the nucleic acid sequence of the locus. Partial or total deletion of a particular locus is also appropriate to generate a variant chimeric poxvirus defective for a particular locus.

[0474] The variant chimeric poxvirus may notably be partially or totally defective in one or more specific loci.

### Variant Chimeric Poxvirus Defective in the J2R Locus

[0475] Preferably, the variant chimeric poxvirus is defective in the J2R locus, where is located the thymidine kinase (TK) encoding-gene (similar to J2R gene in COP). The term “defective in the J2R locus” means that the chimeric poxvirus of the invention encodes a nonfunctional thymidine kinase enzyme or does not encode any thymidine kinase enzyme. Preferably, the chimeric poxvirus of the invention does not encode any thymidine kinase enzyme. The TK enzyme is involved in the synthesis of deoxyribonucleotides. TK is needed for viral replication in healthy cells (preferably primary cells) as these cells have generally low concentration of nucleotides whereas it is dispensable in dividing cells (e.g.: tumor cells) that contain high nucleotide concentration. The alteration of the expression (e.g.: deletion of the J2R locus) or functionality of the TK enzyme may thus improve the tumor selectivity of the chimeric poxvirus by reduction of said chimeric poxvirus replication in non-tumor cells. In a preferred embodiment, the deletion of the TK encoding gene has no or low impact on the lytic activity of said virus. Consequently, a variant chimeric poxvirus defective in the J2R locus may have a lower replication in healthy cells (preferably primary cells) and, as a result, an improved therapeutic index.

[0476] In this case, the variant chimeric poxvirus preferably has at least 99%, at least 99,1%, at least 99,2%, at least 99,3%, at least 99,4%, at least 99,5%, at least 99,6%, at least 99,7%, at least 99,8%, at least 99,9%, at least 99,91%, at least 99,92%, at least 99,93%, at least 99,94%, at least 99,95%, at least 99,96%, at least 99,97%, at least 99,98%, at least 99,99%, or even 100% of identity with SEQ ID NO: 8. SEQ ID NO:8 is the sequence of the core region and one of the ITRs of POXSTG19508, which corresponds to POXSTG19503, except that the GFP::FCU1 sequence has been inserted into the J2R locus.

[0477] In a further embodiment, the variant chimeric poxvirus is strain POXSTG19503 having accession number CNCM-I-5913 and is defective in the J2R locus.

[0478] Preferably, for at least one tumor, the oncolytic power of a variant chimeric poxvirus defective in the J2R locus according to the invention is higher than the oncolytic power measured in the same conditions and at the same time post-infection of at least one of the variant oncolytic parental poxvirus strains Rabbitpox virus strain Utrecht (RPX), Cowpox virus strain Brighton (CPX), Vaccinia virus strain Copenhagen (COP), Vaccinia virus strain Wyeth (WY) and Vaccinia virus strain Western Reserve (WR) defective in the J2R locus. Preferably, for at least one tumor, the oncolytic power of said variant chimeric poxvirus defective in the J2R locus is higher than the oncolytic power measured in the same conditions and at the same time post-infection of a variant parental Vaccinia virus strain Copenhagen (COP) defective in the J2R locus or a variant parental Rabbitpox virus strain Utrecht (RPX) defective in the J2R locus. More preferably, for at least one tumor, the oncolytic power of said variant chimeric poxvirus defective in the J2R locus is higher than the oncolytic powers measured in the same conditions and at the same time post-infection of at least two of the variant oncolytic parental poxvirus strains Rabbitpox virus strain Utrecht (RPX), Cowpox virus strain Brighton (CPX), Vaccinia virus strain Copenhagen (COP), Vaccinia virus strain Wyeth (WY) and Vaccinia virus strain Western Reserve (WR) all defective in the J2R locus. For instance, for at least one tumor, the oncolytic power of said variant chimeric poxvirus defective in the J2R locus is higher than the oncolytic powers measured in the same conditions and at the same time post-infection of a variant parental Vaccinia virus strain Copenhagen (COP) defective in the J2R locus and a variant parental Rabbitpox virus strain Utrecht (RPX) defective in the J2R locus. In a more preferred embodiment, for at least one tumor, the oncolytic power of said variant chimeric poxvirus defective in the J2R locus is higher than the oncolytic powers measured in the same conditions and at the same time post-infection of at least three, more preferably at least four, and even more preferably all five of the variant parental oncolytic poxvirus strains Rabbitpox virus strain Utrecht (RPX), Cowpox virus strain Brighton (CPX), Vaccinia virus strain Copenhagen (COP), Vaccinia virus strain Wyeth (WY) and Vaccinia virus strain Western Reserve (WR) all defective in the J2R locus.

[0479] For a given tumor and virus, the oncolytic power may generally be determined in vitro, 3 to 5 days post-infection of tumor cells with the virus at an MOI of 10⁵ to 10⁻².

[0480] In a specific aspect of this embodiment, the oncolytic power of said variant chimeric poxvirus defective in the J2R locus is higher than the oncolytic power measured in the same conditions and at the same time post-infection of at least one of the variant oncolytic parental poxvirus strains Rabbitpox virus strain Utrecht (RPX), Cowpox virus strain Brighton (CPX), Vaccinia virus strain Copenhagen (COP), Vaccinia virus strain Wyeth (WY) and Vaccinia virus strain Western Reserve (WR) defective in the J2R locus in at least one tumor cell line selected from A549, HCT116 and HepG2. Preferably, for at least one tumor selected from A549, HCT116 and HepG2, the oncolytic power of said variant chimeric poxvirus defective in the J2R locus is higher than the oncolytic power measured in the same conditions and at the same time post-infection of a variant parental Vaccinia virus strain Copenhagen (COP) defective in the J2R locus or a variant parental Rabbitpox virus strain Utrecht (RPX) defective in the J2R locus. More preferably, for at least one tumor cell line selected from A549, HCT116 and HepG2, the oncolytic power of said variant chimeric poxvirus defective in the J2R locus is higher than the oncolytic powers measured in the same conditions and at the same time post-infection of at least two of the variant oncolytic parental poxvirus strains Rabbitpox virus strain Utrecht (RPX), Cowpox virus strain Brighton (CPX), Vaccinia virus strain Copenhagen (COP), Vaccinia virus strain Wyeth (WY) and Vaccinia virus strain Western Reserve (WR) all defective in the J2R locus. For instance, for at least one tumor cell line selected from A549, HCT116 and HepG2, the oncolytic power of said variant chimeric poxvirus defective in the J2R locus is higher than the oncolytic powers measured in the same conditions and at the same time post-infection of a variant parental Vaccinia virus strain Copenhagen (COP) defective in the J2R locus and a variant parental Rabbitpox virus strain Utrecht (RPX) defective in the J2R locus. In a more preferred embodiment, for at least one tumor cell line selected from A549, HCT116 and HepG2, the oncolytic power of said variant chimeric poxvirus defective in the J2R locus is higher than the oncolytic powers measured in the same conditions and at the same time post-infection of at least three, more preferably at least four, and even more preferably all five of the variant parental oncolytic poxvirus strains Rabbitpox virus strain Utrecht (RPX), Cowpox virus strain Brighton (CPX), Vaccinia virus strain Copenhagen (COP), Vaccinia virus strain Wyeth (WY) and Vaccinia virus strain Western Reserve (WR) all defective in the J2R locus.

[0481] Preferably, in this embodiment, the oncolytic power is evaluated 4 days post infection and at an MOI of 10⁵ to 10⁴, preferably 10⁻⁵ or 10⁻⁴. More preferably, in this embodiment, the tumor cell lines are cultured at 37° C., 5% CO₂, in Dulbecco's Modified Eagle Medium (DMEM) with 10% of Fetal Calf Serum (FCS).

[0482] In a more specific aspect of this embodiment:
[0483] a) on A549 and at an MOI of 10⁵, the difference between the oncolytic power of said variant chimeric poxvirus defective in the J2R locus and the oncolytic power measured in the same conditions and at the same time post-infection of at least one of the variant oncolytic parental poxvirus strains RPX, CPX, COP, WY and WR defective in the J2R locus is at least 39%. Preferably, the difference between the oncolytic power of said variant chimeric poxvirus defective in the J2R locus and the oncolytic power measured in the same conditions and at the same time post-infection of a variant parental COP defective in the J2R locus or a variant parental RPX defective in the J2R locus is at least 39%. More preferably, the difference between the oncolytic power of said variant chimeric poxvirus defective in the J2R locus and the oncolytic power measured in the same conditions and at the same time post-infection of at least two of the variant oncolytic parental poxvirus strains RPX, CPX, COP, WY and WR all defective in the J2R locus is at least 39%. For instance, the difference between the oncolytic power of said variant chimeric poxvirus defective in the J2R locus and the oncolytic power measured in the same conditions and at the same time post-infection of a variant parental COP defective in the J2R locus and a variant parental RPX defective in the J2R locus is at least 39%. In a more preferred embodiment, the difference between the oncolytic power of said variant chimeric poxvirus defective in the J2R locus and the oncolytic power measured in the same conditions and at the same time post-infection of at least three, more preferably at least four, and even more preferably all five of the variant parental oncolytic poxvirus strains RPX, CPX, COP, WY and WR all defective in the J2R locus is at least 39%; and/or
[0484] b) on A549 and at an MOI of 10⁻⁴, the difference between the oncolytic power of said variant chimeric poxvirus defective in the J2R locus and the oncolytic power measured in the same conditions and at the same time post-infection of at least one of the variant oncolytic parental poxvirus strains RPX, CPX, COP, WY and WR defective in the J2R locus is at least 13%. Preferably, the difference between the oncolytic power of said variant chimeric poxvirus defective in the J2R locus and the oncolytic power measured in the same conditions and at the same time post-infection of a variant parental COP defective in the J2R locus or a variant parental RPX defective in the J2R locus is at least 20%. More preferably, the difference between the oncolytic power of said variant chimeric poxvirus defective in the J2R locus and the oncolytic power measured in the same conditions and at the same time post-infection of at least two of the variant oncolytic parental poxvirus strains RPX, CPX, COP, WY and WR all defective in the J2R locus is at least 13%. For instance, the difference between the oncolytic power of said variant chimeric poxvirus defective in the J2R locus and the oncolytic power measured in the same conditions and at the same time post-infection of a variant parental COP defective in the J2R locus and a variant parental RPX defective in the J2R locus is at least 20%. In a more preferred embodiment, the difference between the oncolytic power of said variant chimeric poxvirus defective in the J2R locus and the oncolytic power measured in the same conditions and at the same time post-infection of at least three, more preferably at least four, and even more preferably all five of the variant parental oncolytic poxvirus strains RPX, CPX, COP, WY and WR all defective in the J2R locus is at least 13%; and/or
[0485] c) on HCT116 and at an MOI of 10⁵, the difference between the oncolytic power of said variant chimeric poxvirus defective in the J2R locus and the oncolytic power measured in the same conditions and at the same time post-infection of at least one of the variant oncolytic parental poxvirus strains RPX, CPX, COP, WY and WR defective in the J2R locus is at least 80%. Preferably, the difference between the oncolytic power of said variant chimeric poxvirus defective in the J2R locus and the oncolytic power measured in the same conditions and at the same time post-infection of a variant parental COP defective in the J2R locus or a variant parental RPX defective in the J2R locus is at least 80%. More preferably, the difference between the oncolytic power of said variant chimeric poxvirus defective in the J2R locus and the oncolytic power measured in the same conditions and at the same time post-infection of at least two of the variant oncolytic parental poxvirus strains RPX, CPX, COP, WY and WR all defective in the J2R locus is at least 80%. For instance, the difference between the oncolytic power of said variant chimeric poxvirus defective in the J2R locus and the oncolytic power measured in the same conditions and at the same time post-infection of a variant parental COP defective in the J2R locus and a variant parental RPX defective in the J2R locus is at least 80%. In a more preferred embodiment, the difference between the oncolytic power of said variant chimeric poxvirus defective in the J2R locus and the oncolytic power measured in the same conditions and at the same time post-infection of at least three, more preferably at least four, and even more preferably all five of the variant parental oncolytic poxvirus strains RPX, CPX, COP, WY and WR all defective in the J2R locus is at least 80%; and/or
[0486] d) on HCT116 and at an MOI of 10⁴, the difference between the oncolytic power of said variant chimeric poxvirus defective in the J2R locus and the oncolytic power measured in the same conditions and at the same time post-infection of at least one of the variant oncolytic parental poxvirus strains RPX, CPX, COP, WY and WR defective in the J2R locus is at least 33%. Preferably, the difference between the oncolytic power of said variant chimeric poxvirus defective in the J2R locus and the oncolytic power measured in the same conditions and at the same time post-infection of a variant parental COP defective in the J2R locus or a variant parental RPX defective in the J2R locus is at least 33%. More preferably, the difference between the oncolytic power of said variant chimeric poxvirus defective in the J2R locus and the oncolytic power measured in the same conditions and at the same time post-infection of at least two of the variant oncolytic parental poxvirus strains RPX, CPX, COP, WY and WR all defective in the J2R locus is at least 33%. For instance, the difference between the oncolytic power of said variant chimeric poxvirus defective in the J2R locus and the oncolytic power measured in the same conditions and at the same time post-infection of a variant parental COP defective in the J2R locus and a variant parental RPX defective in the J2R locus is at least 33%. In a more preferred embodiment, the difference between the oncolytic power of said variant chimeric poxvirus defective in the J2R locus and the oncolytic power measured in the same conditions and at the same time post-infection of at least three, more preferably at least four, and even more preferably all five of the variant parental oncolytic poxvirus strains RPX, CPX, COP, WY and WR all defective in the J2R locus is at least 33%; and/or
[0487] e) on HepG2 and at an MOI of 10⁵, the difference between the oncolytic power of said variant chimeric poxvirus defective in the J2R locus and the oncolytic power measured in the same conditions and at the same time post-infection of at least one of the variant oncolytic parental poxvirus strains RPX, CPX, COP, WY and WR defective in the J2R locus is at least 66%. Preferably, the difference between the oncolytic power of said variant chimeric poxvirus defective in the J2R locus and the oncolytic power measured in the same conditions and at the same time post-infection of a variant parental COP defective in the J2R locus or a variant parental RPX defective in the J2R locus is at least 66%. More preferably, the difference between the oncolytic power of said variant chimeric poxvirus defective in the J2R locus and the oncolytic power measured in the same conditions and at the same time post-infection of at least two of the variant oncolytic parental poxvirus strains RPX, CPX, COP, WY and WR all defective in the J2R locus is at least 66%. For instance, the difference between the oncolytic power of said variant chimeric poxvirus defective in the J2R locus and the oncolytic power measured in the same conditions and at the same time post-infection of a variant parental COP defective in the J2R locus and a variant parental RPX defective in the J2R locus is at least 66%. In a more preferred embodiment, the difference between the oncolytic power of said variant chimeric poxvirus defective in the J2R locus and the oncolytic power measured in the same conditions and at the same time post-infection of at least three, more preferably at least four, and even more preferably all five of the variant parental oncolytic poxvirus strains RPX, CPX, COP, WY and WR all defective in the J2R locus is at least 66%; and/or
[0488] f) on HepG2 and at an MOI of 10⁴, the difference between the oncolytic power of said variant chimeric poxvirus defective in the J2R locus and the oncolytic power measured in the same conditions and at the same time post-infection of at least one of the variant oncolytic parental poxvirus strains RPX, CPX, COP, WY and WR defective in the J2R locus is at least 29%. Preferably, the difference between the oncolytic power of said variant chimeric poxvirus defective in the J2R locus and the oncolytic power measured in the same conditions and at the same time post-infection of a variant parental COP defective in the J2R locus or a variant parental RPX defective in the J2R locus is at least 29%. More preferably, the difference between the oncolytic power of said variant chimeric poxvirus defective in the J2R locus and the oncolytic power measured in the same conditions and at the same time post-infection of at least two of the variant oncolytic parental poxvirus strains RPX, CPX, COP,

[0489] WY and WR all defective in the J2R locus is at least 29%. For instance, the difference between the oncolytic power of said variant chimeric poxvirus defective in the J2R locus and the oncolytic power measured in the same conditions and at the same time post-infection of a variant parental COP defective in the J2R locus and a variant parental RPX defective in the J2R locus is at least 29%. In a more preferred embodiment, the difference between the oncolytic power of said variant chimeric poxvirus defective in the J2R locus and the oncolytic power measured in the same conditions and at the same time post-infection of at least three, more preferably at least four, and even more preferably all five of the variant parental oncolytic poxvirus strains RPX, CPX, COP, WY and WR all defective in the J2R locus is at least 29%.

[0490] Preferably, in this embodiment, the oncolytic power is evaluated 4 days post infection.

[0491] Alternatively or in combination, for at least one healthy cell (preferably primary cell), the viral replication in the healthy cell (preferably primary cell) of the variant chimeric poxvirus defective in the J2R locus is lower than that of at least one of the five variant oncolytic parental poxvirus strains Rabbitpox virus strain Utrecht (RPX), Cowpox virus strain Brighton (CPX), Vaccinia virus strain Copenhagen (COP), Vaccinia virus strain Wyeth (WY) and Vaccinia virus strain Western Reserve (WR) all defective in the J2R locus. Preferably, for at least one healthy cell (preferably primary cell), the viral replication in the healthy cell (preferably primary cell) of the variant chimeric poxvirus defective in the J2R locus is lower than that of the variant parental Vaccinia virus strain Copenhagen (COP) defective in the J2R locus. In a preferred embodiment, for at least one healthy cell (preferably primary cell), the viral replication in the healthy cell (preferably primary cell) of the variant chimeric poxvirus defective in the J2R locus is lower than that of at least two, more preferably at least three, more preferably at least four, and even more preferably all five of the variant oncolytic parental poxvirus strains Rabbitpox virus strain Utrecht (RPX), Cowpox virus strain Brighton (CPX), Vaccinia virus strain Copenhagen (COP), Vaccinia virus strain Wyeth (WY) and Vaccinia virus strain Western Reserve (WR) all defective in the J2R locus.

[0492] For a given tumor or healthy cells (preferably primary cells), the viral replication may generally be determined in vitro, 2 to 8 days post-infection of tumor or healthy cells (preferably primary cells) with the virus at an MOI of 10⁻⁵ to 10⁻².

[0493] In a specific aspect of this embodiment, the viral replication in healthy cells (preferably primary cells) selected from skin cells and hepatocytes of the variant chimeric poxvirus defective in the J2R locus is lower than that of at least one of the five variant oncolytic parental poxvirus strains Rabbitpox virus strain Utrecht (RPX), Cowpox virus strain Brighton (CPX), Vaccinia virus strain Copenhagen (COP), Vaccinia virus strain Wyeth (WY) and Vaccinia virus strain Western Reserve (WR) all defective in the J2R locus. Preferably, for at least one healthy cell (preferably primary cell) selected from skin cells and hepatocytes, the viral replication in said healthy cell (preferably primary cell) selected from skin cells and hepatocytes of the variant chimeric poxvirus defective in the J2R locus is lower than that of the variant parental Vaccinia virus strain Copenhagen (COP) defective in the J2R locus. In a preferred embodiment, for at least one healthy cell (preferably primary cell) selected from skin cells and hepatocytes, the viral replication in said healthy cell (preferably primary cell) selected from skin cells and hepatocytes of the variant chimeric poxvirus defective in the J2R locus is lower than that of at least two, preferably at least three, more preferably at least four, and even more preferably all five of the variant oncolytic parental poxvirus strains Rabbitpox virus strain Utrecht (RPX), Cowpox virus strain Brighton (CPX), Vaccinia virus strain Copenhagen (COP), Vaccinia virus strain Wyeth (WY) and Vaccinia virus strain Western Reserve (WR) all defective in the J2R locus.

[0494] In a more specific embodiment of this aspect, the viral replication of said variant chimeric poxvirus defective in the J2R locus is:
[0495] a) at least 1.6 times lower in at least in at least one healthy cell line (preferably primary cell line) selected from skin cells and hepatocytes than that of at least one of the five variant oncolytic parental poxvirus strains RPX, CPX, COP, WY and WR all defective in the J2R locus, preferably than that of the variant oncolytic parental COP defective in the J2R locus, more preferably than that of at least two, more preferably at least three, more preferably at least four, and even more preferably each of the five variant oncolytic parental poxvirus strains RPX, CPX, COP, WY and WR all defective in the J2R locus; and/or
[0496] b) at least 4.5 times lower in hepatocytes than that of at least one of the five variant oncolytic parental poxvirus strains RPX, CPX, COP, WY and WR all defective in the J2R locus, preferably than that of the variant oncolytic parental COP defective in the J2R locus, more preferably than that of at least two, more preferably at least three, more preferably at least four, and even more preferably each of the five variant oncolytic parental poxvirus strains RPX, CPX, COP, WY and WR all defective in the J2R locus.

[0497] Preferably, in this embodiment, the viral replication is evaluated in vitro 3 days post infection and at a MOI of 10⁻⁴ on HepG2, or 7 days post infection and at 10⁵ PFU on human skin model. More preferably, in this embodiment, the tumor cell lines are cultured at 37° C., 5% CO₂, in Dulbecco's Modified Eagle Medium (DMEM) with 10% of Fetal Calf Serum (FCS).

[0498] Alternatively or in combination, for at least one organ, the therapeutic index of said variant chimeric poxvirus defective in the J2R locus is higher than the therapeutic index measured in the same conditions and at the same time post-infection of at least one of the variant parental oncolytic poxvirus strains Rabbitpox virus strain Utrecht (RPX), Cowpox virus strain Brighton (CPX), Vaccinia virus strain Copenhagen (COP), Vaccinia virus strain Wyeth (WY) and Vaccinia virus strain Western Reserve (WR) all defective in the J2R locus. Preferably, for at least one organ, the therapeutic index of said variant chimeric poxvirus defective in the J2R locus is higher than the therapeutic index measured in the same conditions and at the same time post-infection of the variant parental Vaccinia virus strain Copenhagen (COP) defective in the J2R locus. In a more preferred embodiment, for at least one organ, the therapeutic index of said variant chimeric poxvirus defective in the J2R locus is higher than the therapeutic index measured in the same conditions and at the same time post-infection of at least two, more preferably at least three, more preferably at least four, and even more preferably all five of the variant parental oncolytic poxvirus strains Rabbitpox virus strain Utrecht (RPX), Cowpox virus strain Brighton (CPX), Vaccinia virus strain Copenhagen (COP), Vaccinia virus strain Wyeth (WY) and Vaccinia virus strain Western Reserve (WR) all defective in the J2R locus.

[0499] For a given organ and virus, the therapeutic index may generally be determined in vitro, 2 to 8 days post-infection of tumor or healthy cells (preferably primary cells) with the virus at an MOI of 10⁵ to 10⁻².

[0500] In a specific aspect of this embodiment, the hepatic therapeutic index of said variant chimeric poxvirus defective in the J2R locus is higher than the hepatic therapeutic index measured in the same conditions and at the same time post-infection of at least one of the variant parental oncolytic poxvirus strains Rabbitpox virus strain Utrecht (RPX), Cowpox virus strain Brighton (CPX), Vaccinia virus strain Copenhagen (COP), Vaccinia virus strain Wyeth (WY) and Vaccinia virus strain Western Reserve (WR) all defective in the J2R locus. Preferably, the hepatic therapeutic index of said variant chimeric poxvirus defective in the J2R locus is higher than the hepatic therapeutic index measured in the same conditions and at the same time post-infection of the variant parental Vaccinia virus strain Copenhagen (COP) defective in the J2R locus. In a more preferred embodiment, the hepatic therapeutic index of said variant chimeric poxvirus defective in the J2R locus is higher than the hepatic therapeutic index measured in the same conditions and at the same time post-infection of at least two, more preferably at least three, more preferably at least four, and even more preferably all five of the variant parental oncolytic poxvirus strains Rabbitpox virus strain Utrecht (RPX), Cowpox virus strain Brighton (CPX), Vaccinia virus strain Copenhagen (COP), Vaccinia virus strain Wyeth (WY) and Vaccinia virus strain Western Reserve (WR) all defective in the J2R locus.

[0501] Preferably, the hepatic therapeutic index of said variant chimeric poxvirus defective in the J2R locus is at least 9 times higher than the hepatic therapeutic index measured in the same conditions and at the same time post-infection of at least one of the variant parental oncolytic poxvirus strains Rabbitpox virus strain Utrecht (RPX), Cowpox virus strain Brighton (CPX), Vaccinia virus strain Copenhagen (COP), Vaccinia virus strain Wyeth (WY) and Vaccinia virus strain Western Reserve (WR) all defective in the J2R locus. Preferably, the hepatic therapeutic index of said variant chimeric poxvirus defective in the J2R locus is at least 9 times higher than the hepatic therapeutic index measured in the same conditions and at the same time post-infection of the variant parental Vaccinia virus strain Copenhagen (COP) defective in the J2R locus. In a more preferred embodiment, the hepatic therapeutic index of said variant chimeric poxvirus defective in the J2R locus is at least 9 times higher than the hepatic therapeutic index measured in the same conditions and at the same time post-infection of at least two, preferably at least three, more preferably at least four, and even more preferably all five of the variant parental oncolytic poxvirus strains Rabbitpox virus strain Utrecht (RPX), Cowpox virus strain Brighton (CPX), Vaccinia virus strain Copenhagen (COP), Vaccinia virus strain Wyeth (WY) and Vaccinia virus strain Western Reserve (WR) all defective in the J2R locus.

[0502] More preferably, in this embodiment, the hepatic therapeutic index is measured in vitro in a setting in which the variant chimeric poxvirus is added respectively to the HepG2 tumor cells at a MOI of 10⁻⁵ and to the healthy hepatocytes (preferably primary hepatocytes) at an MOI of 10⁴ and the replication of the variant chimeric poxvirus in the HepG2 tumor cells and in the healthy hepatocytes (preferably primary hepatocytes) is measured 3 days post infection. Even more preferably, in this embodiment, the HepG2 tumor cell lines are cultured at 37° C., 5% CO₂, in Dulbecco's Modified Eagle Medium (DMEM) with 10% of Fetal Calf Serum (FCS), and the healthy hepatocytes (preferably primary hepatocytes) are cultured at 37° C., 5% CO₂, in basal hepatic cell medium (BIOPREDICS catalogue reference MIL600) and additives for hepatocytes culture medium (BIOPREDICS catalogue reference ADD222C). Optionally, the variant chimeric poxvirus defective in the J2R locus has a higher hepatic therapeutic index than the corresponding hepatic therapeutic indexes of the wild-type chimeric poxvirus not defective in the J2R locus.

[0503] Alternatively or in combination, for at least one producer cell (preferably a tumor cell), the EEV-SC of a variant chimeric poxvirus defective in the J2R locus is higher than the EEV-SC measured in the same conditions and at the same time post-infection of at least one of the variant parental poxvirus strains Rabbitpox virus strain Utrecht (RPX), Cowpox virus strain Brighton (CPX), Vaccinia virus strain Copenhagen (COP), Vaccinia virus strain Wyeth (WY), Vaccinia virus strain Western Reserve (WR) and Modified Vaccinia virus strain Ankara (MVA) all defective in the J2R locus. Preferably, for at least one producer cell (preferably a tumor cell), the EEV-SC of a variant chimeric poxvirus defective in the J2R locus is higher than the EEV-SC measured in the same conditions and at the same time post-infection of at least one of the variant parental COP defective in the J2R locus or the variant parental Rabbitpox virus strain Utrecht (RPX) defective in the J2R locus. In a preferred embodiment, for at least one producer cell (preferably a tumor cell), the EEV-SC of a variant chimeric poxvirus defective in the J2R locus is higher than the EEV-SC measured in the same conditions and at the same time post-infection of at least two of the variant parental poxvirus strains Rabbitpox virus strain Utrecht (RPX), Cowpox virus strain Brighton (CPX), Vaccinia virus strain Copenhagen (COP), Vaccinia virus strain Wyeth (WY), Vaccinia virus strain Western Reserve (WR) and Modified Vaccinia virus strain Ankara (MVA) all defective in the J2R locus. For instance, for at least one producer cell (preferably a tumor cell), the EEV-SC of a variant chimeric poxvirus defective in the J2R locus is higher than the EEV-SC measured in the same conditions and at the same time post-infection of at least one of the variant parental Vaccinia virus strain Copenhagen (COP) defective in the J2R locus and of the variant parental Rabbitpox virus strain Utrecht (RPX) defective in the J2R locus. In a more preferred embodiment, for at least one producer cell (preferably a tumor cell), the EEV-SC of a variant chimeric poxvirus defective in the J2R locus is higher than the EEV-SC measured in the same conditions and at the same time post-infection of at least three, preferably at least four, more preferably at least five and even more preferably all six of the variant parental poxvirus strains Rabbitpox virus strain Utrecht (RPX), Cowpox virus strain Brighton (CPX), Vaccinia virus strain Copenhagen (COP), Vaccinia virus strain Wyeth (WY), Vaccinia virus strain Western Reserve (WR) and Modified Vaccinia virus strain Ankara (MVA) all defective in the J2R locus.

[0504] For a given tumor and virus, the EEV-SC may generally be determined in vitro, 16 to 24 hours post-infection of tumor cells with the virus at an MOI of 10⁻⁴ to 10⁻¹.

[0505] In a specific aspect of this embodiment, in A549 tumor cell line, the EEV-SC of a variant chimeric poxvirus defective in the J2R locus is higher than the EEV-SC measured in the same conditions and at the same time post-infection of at least one of the variant parental poxvirus strains RPX, CPX, COP, WY, WR and MVA, all defective in the J2R locus. Preferably, in A549 tumor cell line, the EEV-SC of a variant chimeric poxvirus defective in the J2R locus is higher than the EEV-SC measured in the same conditions and at the same time post-infection of at least one of the variant parental COP defective in the J2R locus or the variant parental RPX defective in the J2R locus. In a preferred embodiment, in A549 tumor cell line, the EEV-SC of a variant chimeric poxvirus defective in the J2R locus is higher than the EEV-SC measured in the same conditions and at the same time post-infection of at least two of the variant parental poxvirus strains RPX, CPX, COP, WY, WR and MVA all defective in the J2R locus. For instance, in A549 tumor cell line, the EEV-SC of a variant chimeric poxvirus defective in the J2R locus is higher than the EEV-SC measured in the same conditions and at the same time post-infection of at least one of the variant parental COP defective in the J2R locus and of the variant parental RPX defective in the J2R locus. In a more preferred embodiment, in A549 tumor cell line, the EEV-SC of a variant chimeric poxvirus defective in the J2R locus is higher than the EEV-SC measured in the same conditions and at the same time post-infection of at least three, preferably at least four, more preferably at least five, and even more preferably all six of the variant parental poxvirus strains RPX, CPX, COP, WY, WR and MVA all defective in the J2R locus.

[0506] Preferably, the EEV-SC of a variant chimeric poxvirus defective in the J2R locus is:
[0507] a) 16 hours post-injection in A549 tumor cell line, at least 1.2 times higher than the EEV-SC measured in the same conditions and at the same time post-infection of at least one of the variant parental poxvirus strains RPX, CPX, COP, WY, WR and MVA all defective in the J2R locus, preferably than that of at least one of the variant parental COP defective in the J2R locus or the variant parental RPX defective in the J2R locus, more preferably than that of at least two of the variant parental poxvirus strains RPX, CPX, COP, WY, WR and MVA all defective in the J2R locus, even more preferably than that of one of the variant parental COP defective in the J2R locus and of the variant parental RPX defective in the J2R locus, even more preferably than that of at least three, preferably at least four, more preferably at least five, and even more preferably all six of the variant parental poxvirus strains RPX, CPX, COP, WY, WR and MVA all defective in the J2R locus; and/or
[0508] b) 24 hours post-injection in A549 tumor cell line, at least 3 times higher than the EEV-SC measured in the same conditions and at the same time post-infection of at least one of the variant parental poxvirus strains RPX, CPX, COP, WY, WR and MVA all defective in the J2R locus, preferably than that of at least one of the variant parental COP defective in the J2R locus or the variant parental RPX defective in the J2R locus, more preferably than that of at least two of the variant parental poxvirus strains RPX, CPX, COP, WY, WR and MVA all defective in the J2R locus, even more preferably than that of one of the variant parental COP defective in the J2R locus and of the variant parental RPX defective in the J2R locus, even more preferably than that of at least three, preferably at least four, more preferably at least five, and even more preferably all six of the variant parental poxvirus strains RPX, CPX, COP, WY, WR and MVA all defective in the J2R locus.

[0509] For at least one producer cell (preferably a tumor cell), the EEV-SC of a variant chimeric poxvirus defective in the J2R locus may further be higher than the EEV-SC measured in the same conditions and at the same time post-infection of the Vaccinia virus strain IHD-J.

[0510] Preferably, the EEV-SC of the variant chimeric poxvirus defective in the J2R locus is at least:
[0511] a) 2 times higher than the EEV-SC measured in the same conditions and at the same time post-infection of Vaccinia virus strain IHD-J, 16 hours post-injection on A549 tumor cell line; and/or
[0512] b) 3 times higher than the EEV-SC measured in the same conditions and at the same time post-infection of Vaccinia virus strain IHD-J, 24 hours post-injection on A549 tumor cell line.

[0513] In a more specific embodiment of this aspect, the EEV-SC of the variant chimeric poxvirus defective in the J2R locus is:
[0514] a) at least 4%, preferably at least 5%, more preferably at least 6%, 16 hours post-infection of the said variant chimeric poxvirus defective in the J2R locus on A549 tumor cell line at an MOI of 10⁻² to 1, preferably at an MOI of 0.1; and/or
[0515] b) at least 5%, at least 6%, at least 7%, at least 8%, preferably at least 9%, more preferably at least 10%, even more preferably at least 11%, 24 hours post-infection of the said variant chimeric poxvirus defective in the J2R locus on A549 tumor cell line at an MOI of 10⁻² to 1, preferably at an MOI of 0.1.

[0516] In a more specific embodiment of this aspect, the EEV-SC of the variant chimeric poxvirus defective in the J2R locus is:
[0517] a) comprised between 4% and 9%, more preferably between 6% and 8%, 16 hours post-infection of the said variant chimeric poxvirus defective in the J2R locus on A549 tumor cell line at an MOI of 10⁻² to 1, preferably at an MOI of 0.1; and/or
[0518] b) comprised between 5% and 15%, more preferably between 10% and 13%, 24 hours post-infection of the said variant chimeric poxvirus defective in the J2R locus on A549 tumor cell line at an MOI of 10⁻² to 1, preferably at an MOI of 0.1.

[0519] Alternatively or in combination, for at least one tumor, the spreading capacity of a variant chimeric poxvirus defective in the J2R locus is higher than the spreading capacity measured in the same conditions and at the same time post-infection of at least one of the variant parental poxvirus strains RPX, CPX, COP, WY, WR and MVA all defective in the J2R locus. Preferably, for at least one tumor, the spreading capacity of a variant chimeric poxvirus defective in the J2R locus is higher than the spreading capacity measured in the same conditions and at the same time post-infection of the variant parental COP defective in the J2R locus or the variant parental RPX defective in the J2R locus. More preferably, for at least one tumor, the spreading capacity of a variant chimeric poxvirus defective in the J2R locus is higher than the spreading capacity measured in the same conditions and at the same time post-infection of at least two of the variant parental poxvirus strains RPX, CPX, COP, WY, WR and MVA all defective in the J2R locus. For instance, for at least one tumor, the spreading capacity of a variant chimeric poxvirus defective in the J2R locus is higher than the spreading capacity measured in the same conditions and at the same time post-infection of the variant parental COP defective in the J2R locus and the variant parental RPX defective in the J2R locus. In a preferred embodiment, for at least one tumor, the spreading capacity of a variant chimeric poxvirus defective in the J2R locus is higher than the spreading capacity measured in the same conditions and at the same time post-infection of at least three, preferably at least four, more preferably at least five and even more preferably all six of the variant parental poxvirus strains RPX, CPX, COP, WY, WR and MVA all defective in the J2R locus.

[0520] Alternatively or in combination, for at least one poxvirus-specific antibody and tumor, the neutralization rate of a variant chimeric poxvirus defective in the J2R locus is lower than the neutralization rate measured in the same conditions and at the same time post-infection of at least one of the variant parental poxvirus strains RPX, CPX, COP, WY, WR and MVA all defective in the J2R locus. Preferably for at least one poxvirus-specific antibody and tumor, the neutralization rate of a variant chimeric poxvirus defective in the J2R locus is lower than the neutralization rate measured in the same conditions and at the same time post-infection of the variant parental COP defective in the J2R locus. More preferably, for at least one poxvirus-specific antibody and tumor, the neutralization rate of a variant chimeric poxvirus defective in the J2R locus is lower than the neutralization rate measured in the same conditions and at the same time post-infection of at least two, preferably at least three, more preferably at least four, even more preferably at least five, and even more preferably all six of the variant parental poxvirus strains RPX, CPX, COP, WY, WR and MVA all defective in the J2R locus.

[0521] For a given tumor and virus, the viral neutralization rate may generally be determined in vitro, 3 to 5 days post-infection of tumor cells with the virus at an MOI of 3×10⁻⁵ to 3.

[0522] In this embodiment, for at least one vaccinia virus-specific antibody and on HCT116, the neutralization rate of a variant chimeric poxvirus defective in the J2R locus is lower than the neutralization rate measured in the same conditions and at the same time post-infection of at least one of the variant parental poxvirus strains RPX, CPX, COP, WY, WR and MVA all defective in the J2R locus. Preferably for at least one vaccinia virus-specific antibody and on HCT116, the neutralization rate of a variant chimeric poxvirus defective in the J2R locus is lower than the neutralization rate measured in the same conditions and at the same time post-infection of the variant parental COP defective in the J2R locus. More preferably, for at least one vaccinia virus-specific antibody and on HCT116, the neutralization rate of a variant chimeric poxvirus defective in the J2R locus is lower than the neutralization rate measured in the same conditions and at the same time post-infection of at least two, preferably at least three, more preferably at least four, even more preferably at least five, and even more preferably all six of the variant parental poxvirus strains RPX, CPX, COP, WY, WR and MVA all defective in the J2R locus.

[0523] In a specific aspect of this embodiment, for at least one vaccinia virus-specific antibody and on HCT116, the neutralization rate of a variant chimeric poxvirus defective in the J2R locus is at least 60 times, more preferably at least 70 times lower than the neutralization rate measured in the same conditions and at the same time post-infection of at least one of the variant parental poxvirus strains RPX, CPX, COP, WY, WR and MVA all defective in the J2R locus, preferably than that of the variant parental COP defective in the J2R locus, more preferably than that of at least two, preferably at least three, more preferably at least four, even more preferably at least five, and even more preferably all six of the variant parental poxvirus strains RPX, CPX, COP, WY, WR and MVA all defective in the J2R locus.

[0524] In a more specific aspect of this embodiment, for at least one vaccinia virus-specific antibody and on HCT116, the neutralization rate of a variant chimeric poxvirus defective in the J2R locus is between 30 to 100 times, even more between 40 to 90 times, even more between 55 to 75 times lower than the neutralization rate measured in the same conditions and at the same time post-infection of at least one of the variant parental poxvirus strains RPX, CPX, COP, WY, WR and MVA all defective in the J2R locus, preferably than that of the variant parental COP defective in the J2R locus, more preferably than that of at least two, preferably at least three, more preferably at least four, even more preferably at least five, and even more preferably all six of the variant parental poxvirus strains RPX, CPX, COP, WY, WR and MVA all defective in the J2R locus.

[0525] Alternatively or in combination, the complement-mediated virus neutralization rate of a variant chimeric poxvirus defective in the J2R locus is lower than the complement-mediated virus neutralization rate measured in the same conditions of at least one of the variant parental poxvirus strains RPX, CPX, COP, WY, WR and MVA all defective in the J2R locus. Preferably, the complement-mediated virus neutralization rate of a variant chimeric poxvirus defective in the J2R locus is lower than the complement-mediated virus neutralization rate measured in the same conditions of the variant parental COP defective in the J2R locus. More preferably, the complement-mediated virus neutralization rate of a variant chimeric poxvirus defective in the J2R locus is lower than the complement-mediated virus neutralization rate measured in the same conditions of at least two, preferably at least three, more preferably at least four, even more preferably at least five, and even more preferably all six of the variant parental poxvirus strains RPX, CPX, COP, WY, WR and MVA all defective in the J2R locus.

[0526] For a given virus, the complement-mediated virus neutralization rate may be generally determined in vitro, in presence of active or heat-inactivated serum with the virus at a dose of 10⁴ to 10⁸ PFU/mL.

[0527] In a specific aspect of this embodiment, the complement-mediated virus neutralization rate of a variant chimeric poxvirus defective in the J2R locus is at least 5 times, more preferably at least 6 times, even more preferably at least 6,8 times lower than the complement-mediated virus neutralization rate measured in the same conditions of at least one of the variant parental poxvirus strains RPX, CPX, COP, WY, WR and MVA all defective in the J2R locus, preferably than that of the variant parental COP defective in the J2R locus, more preferably than that of at least two, preferably at least three, more preferably at least four, even more preferably at least five, and even more preferably all six of the variant parental poxvirus strains RPX, CPX, COP, WY, WR and MVA all defective in the J2R locus.

[0528] In a more specific aspect of this embodiment, the complement-mediated virus neutralization rate of a variant chimeric poxvirus defective in the J2R locus is between 5 to 10 times, even more between 6 to 8 times lower than the complement-mediated virus neutralization rate measured in the same conditions of at least one of the variant parental poxvirus strains RPX, CPX, COP, WY, WR and MVA all defective in the J2R locus, preferably than that of the variant parental COP defective in the J2R locus, more preferably than that of at least two, preferably at least three, more preferably at least four, even more preferably at least five, and even more preferably all six of the variant parental poxvirus strains RPX, CPX, COP, WY, WR and MVA all defective in the J2R locus.

[0529] Alternatively or in combination, for at least one producer cell (preferably in tumor cell), the syncytia formation capacity of a variant chimeric poxvirus defective in the J2R locus is higher than the syncytia formation capacity measured in the same conditions and at the same time post-infection of at least one of the variant parental poxvirus strains RPX, CPX, COP, WY, WR and MVA all defective in the J2R locus. Preferably, for at least one producer cell (preferably in tumor cell), the syncytia formation capacity of a variant chimeric poxvirus defective in the J2R locus is higher than the syncytia formation capacity measured in the same conditions and at the same time post-infection of the variant parental COP defective in the J2R locus. More preferably, for at least one producer cell (preferably a tumor cell), the syncytia formation capacity of a variant chimeric poxvirus defective in the J2R locus is higher than the syncytia formation capacity measured in the same conditions and at the same time post-infection of at least two of the variant parental poxvirus strains RPX, CPX, COP, WY, WR and MVA all defective in the J2R locus. For instance, for at least one producer cell, the syncytia formation capacity of a variant chimeric poxvirus defective in the J2R locus is higher than the syncytia formation capacity measured in the same conditions and at the same time post-infection of at least three, preferably at least four, more preferably at least five and even more preferably all six of the variant parental poxvirus strains RPX, CPX, COP, WY, WR and MVA all defective in the J2R locus.

[0530] In a specific aspect of this embodiment, in HCT116, the syncytia formation capacity of a variant chimeric poxvirus defective in the J2R locus is higher than the syncytia formation capacity measured in the same conditions and at the same time post-infection of at least one of the variant parental poxvirus strains RPX, CPX, COP, WY, WR and MVA all defective in the J2R locus. Preferably, in HCT116, the syncytia formation capacity of a variant chimeric poxvirus defective in the J2R locus is higher than the syncytia formation capacity measured in the same conditions and at the same time post-infection of the variant parental COP defective in the J2R locus. More preferably, in HCT116, the syncytia formation capacity of a variant chimeric poxvirus defective in the J2R locus is higher than the syncytia formation capacity measured in the same conditions and at the same time post-infection of at least two of the variant parental poxvirus strains RPX, CPX, COP, WY, WR and MVA all defective in the J2R locus. For instance, for at least one producer cell, the syncytia formation capacity of a variant chimeric poxvirus defective in the J2R locus is higher than the syncytia formation capacity measured in the same conditions and at the same time post-infection of at least three, preferably at least four, more preferably at least five and even more preferably all six of the variant parental poxvirus strains RPX, CPX, COP, WY, WR and MVA all defective in the J2R locus.

[0531] A variant chimeric poxvirus defective in the J2R locus according to the invention may combine several of the above-described functional features, including:
[0532] a high oncolytic power as disclosed above (preferably compared to variant parental Vaccinia virus strain Copenhagen (COP) defective in the J2R locus, to variant parental Rabbitpox virus strain Utrecht (RPX) defective in the J2R locus, to variant parental COP defective in the J2R locus and variant parental RPX defective in the J2R locus, or to all variant parental poxvirus strains defective in the J2R locus);
[0533] a low viral replication in healthy cells (preferably primary cells) as disclosed above (preferably compared to variant parental Vaccinia virus strain Copenhagen (COP) defective in the J2R locus or to all variant parental poxvirus strains defective in the J2R locus);
[0534] a high EEV-SC, a high syncytia formation capacity, a high spreading capacity, a low neutralization rate in the presence of poxvirus-specific antibody, and/or a low complement-mediated virus neutralization rate as disclosed above (preferably compared to variant parental Vaccinia virus strain Copenhagen (COP) defective in the J2R locus, to variant parental Rabbitpox virus strain Utrecht (RPX) defective in the J2R locus, to Vaccinia virus strain IHD-J or to all variant parental poxvirus strains defective in the J2R locus).

[0535] In particular, a variant chimeric poxvirus defective in the J2R locus may comprise:
[0536] a high oncolytic power as disclosed above and a low viral replication in healthy cells (preferably primary cells) as disclosed above;
[0537] a high oncolytic power as disclosed above and (a high EEV-SC, a high syncytia formation capacity, a high spreading capacity, a low neutralization rate in the presence of poxvirus-specific antibody, and/or a low complement-mediated virus neutralization rate as disclosed above);
[0538] a low viral replication in healthy cells (preferably primary cells) as disclosed above and (a high EEV-SC, a high syncytia formation capacity, a high spreading capacity, a low neutralization rate in the presence of poxvirus-specific antibody, and/or a low complement-mediated virus neutralization rate as disclosed above); or
[0539] a high oncolytic power as disclosed above, a low viral replication in healthy cells (preferably primary cells) as disclosed above and (a high EEV-SC, a high syncytia formation capacity, a high spreading capacity, a low neutralization rate in the presence of poxvirus-specific antibody, and/or a low complement-mediated virus neutralization rate as above).

[0540] A particularly preferred variant chimeric poxvirus defective in the J2R locus according to the invention comprises the following functional features:
[0541] for at least one tumor, the oncolytic power of said variant chimeric poxvirus defective in the J2R locus is higher than the oncolytic power measured in the same conditions and at the same time post-infection of the variant parental Vaccinia virus strain Copenhagen (COP) defective in the J2R locus or the variant parental Rabbitpox virus strain Utrecht (RPX) defective in the J2R locus;
[0542] for at least one healthy cell (preferably primary cell), the viral replication in the healthy cell (preferably primary cell) of said variant chimeric poxvirus defective in the J2R locus is lower than that of the variant parental Vaccinia virus strain Copenhagen (COP) defective in the J2R locus;
[0543] for at least one producer cell (preferably a tumor cell), the EEV-SC of said variant chimeric poxvirus defective in the J2R locus is higher than the EEV-SC measured in the same conditions and at the same time post-infection of the variant parental Rabbitpox virus strain Utrecht (RPX) defective in the J2R locus or the Vaccinia virus strain IHD-J;
[0544] optionally, for at least one poxvirus-specific antibody and tumor, the neutralization rate of said variant chimeric poxvirus defective in the J2R locus is lower than the neutralization rate measured in the same conditions and at the same time post-infection of the variant parental Vaccinia virus strain Copenhagen (COP) defective in the J2R locus;
[0545] optionally, the complement-mediated virus neutralization rate of said variant chimeric poxvirus defective in the J2R locus is lower than the complement-mediated virus neutralization rate measured in the same conditions of the parental Vaccinia virus strain Copenhagen (COP) defective in J2R locus; and
[0546] optionally, for at least one producer cell (preferably a tumor cell), the syncytia formation capacity of said variant chimeric poxvirus defective in J2R locus is higher than the syncytia formation capacity measured in the same conditions and at the same time post-infection of the parental Vaccinia virus strain Copenhagen (COP) defective in J2R locus.

[0547] A further particularly preferred variant chimeric poxvirus defective in the J2R locus according to the invention comprises the following functional features:
[0548] for at least one tumor, the oncolytic power of said variant chimeric poxvirus defective in the J2R locus is higher than the oncolytic power measured in the same conditions and at the same time post-infection of the variant parental Vaccinia virus strain Copenhagen (COP) defective in the J2R locus or the variant parental Rabbitpox virus strain Utrecht (RPX) defective in the J2R locus;
[0549] for at least one healthy cell (preferably primary cell), the viral replication in the healthy cell (preferably primary cell) of said variant chimeric poxvirus defective in the J2R locus is lower than that of the variant parental Vaccinia virus strain Copenhagen (COP) defective in the J2R locus;
[0550] for at least one producer cell (preferably a tumor cell), the syncytia formation capacity of said variant chimeric poxvirus defective in J2R locus is higher than the syncytia formation capacity measured in the same conditions and at the same time post-infection of the parental Vaccinia virus strain Copenhagen (COP) defective in J2R locus;
[0551] optionally, for at least one producer cell (preferably a tumor cell), the EEV-SC of said variant chimeric poxvirus defective in the J2R locus is higher than the EEV-SC measured in the same conditions and at the same time post-infection of the variant parental Rabbitpox virus strain Utrecht (RPX) defective in the J2R locus or the Vaccinia virus strain IHD-J;
[0552] optionally, for at least one poxvirus-specific antibody and tumor, the neutralization rate of said variant chimeric poxvirus defective in the J2R locus is lower than the neutralization rate measured in the same conditions and at the same time post-infection of the variant parental Vaccinia virus strain Copenhagen (COP) defective in the J2R locus; and
[0553] optionally, the complement-mediated virus neutralization rate of said variant chimeric poxvirus defective in the J2R locus is lower than the complement-mediated virus neutralization rate measured in the same conditions of the parental Vaccinia virus strain Copenhagen (COP) defective in J2R locus.

[0554] A more particularly preferred variant chimeric poxvirus defective in the J2R locus according to the invention comprises the following functional features:
[0555] for at least one tumor, the oncolytic power of said variant chimeric poxvirus defective in the J2R locus is higher than the oncolytic power measured in the same conditions and at the same time post-infection of the variant parental Vaccinia virus strain Copenhagen (COP) defective in the J2R locus or the variant parental Rabbitpox virus strain Utrecht (RPX) defective in the J2R locus;
[0556] for at least one healthy cell (preferably primary cell), the viral replication in the healthy cell (preferably primary cell) of said variant chimeric poxvirus defective in the J2R locus is lower than that of the variant parental Vaccinia virus strain Copenhagen (COP) defective in the J2R locus;
[0557] for at least one producer cell (preferably a tumor cell), the EEV-SC of said variant chimeric poxvirus defective in the J2R locus is higher than the EEV-SC measured in the same conditions and at the same time post-infection of the variant parental Rabbitpox virus strain Utrecht (RPX) defective in the J2R locus or the Vaccinia virus strain IHD-J;
[0558] for at least one producer cell (preferably a tumor cell), the syncytia formation capacity of said variant chimeric poxvirus defective in J2R locus is higher than the syncytia formation capacity measured in the same conditions and at the same time post-infection of the parental Vaccinia virus strain Copenhagen (COP) defective in J2R locus;
[0559] optionally, for at least one poxvirus-specific antibody and tumor, the neutralization rate of said variant chimeric poxvirus defective in the J2R locus is lower than the neutralization rate measured in the same conditions and at the same time post-infection of the variant parental Vaccinia virus strain Copenhagen (COP) defective in the J2R locus; and
[0560] optionally, the complement-mediated virus neutralization rate of said variant chimeric poxvirus defective in the J2R locus is lower than the complement-mediated virus neutralization rate measured in the same conditions of the parental Vaccinia virus strain Copenhagen (COP) defective in J2R locus.

[0561] The variant chimeric poxvirus defective in the J2R locus of the invention may alternatively comprise a high therapeutic index as disclosed above and (a high EEV-SC, a high syncytia formation capacity, a high spreading capacity, a low neutralization rate in the presence of poxvirus-specific antibody and/or a low complement-mediated virus neutralization rate as disclosed above). A particularly preferred variant chimeric poxvirus defective in the J2R locus according to the invention comprises the following functional features:
[0562] for at least one organ, the therapeutic index of said variant chimeric poxvirus defective in the J2R locus is higher than the therapeutic index measured in the same conditions and at the same time post-infection of the variant parental Vaccinia virus strain Copenhagen (COP) defective in the J2R locus;
[0563] for at least one producer cell (preferably a tumor cell), the EEV-SC of said variant chimeric poxvirus defective in the J2R locus is higher than the EEV-SC measured in the same conditions and at the same time post-infection of the variant parental Rabbitpox virus strain Utrecht (RPX) defective in the J2R locus or the Vaccinia virus strain IHD-J;
[0564] optionally, for at least one poxvirus-specific antibody and tumor, the neutralization rate of said variant chimeric poxvirus defective in the J2R locus is lower than the neutralization rate measured in the same conditions and at the same time post-infection of the variant parental Vaccinia virus strain Copenhagen (COP) defective in the J2R locus;
[0565] optionally, the complement-mediated virus neutralization rate of said variant chimeric poxvirus defective in J2R locus is lower than the complement-mediated virus neutralization rate measured in the same conditions of the parental Vaccinia virus strain Copenhagen (COP) defective in J2R locus; and
[0566] optionally, for at least one producer cell (preferably a tumor cell), the syncytia formation capacity of said variant chimeric poxvirus defective in J2R locus is higher than the syncytia formation capacity measured in the same conditions and at the same time post-infection of the parental Vaccinia virus strain Copenhagen (COP) defective in J2R locus.

[0567] A further preferred variant chimeric poxvirus defective in the J2R locus according to the invention comprises the following functional features:
[0568] for at least one organ, the therapeutic index of said variant chimeric poxvirus defective in the J2R locus is higher than the therapeutic index measured in the same conditions and at the same time post-infection of the variant parental Vaccinia virus strain Copenhagen (COP) defective in the J2R locus;
[0569] for at least one producer cell (preferably a tumor cell), the syncytia formation capacity of said variant chimeric poxvirus defective in J2R locus is higher than the syncytia formation capacity measured in the same conditions and at the same time post-infection of the parental Vaccinia virus strain Copenhagen (COP) defective in J2R locus;
[0570] optionally, for at least one producer cell (preferably a tumor cell), the EEV-SC of said variant chimeric poxvirus defective in the J2R locus is higher than the EEV-SC measured in the same conditions and at the same time post-infection of the variant parental Rabbitpox virus strain Utrecht (RPX) defective in the J2R locus or the Vaccinia virus strain IHD-J;
[0571] optionally, for at least one poxvirus-specific antibody and tumor, the neutralization rate of said variant chimeric poxvirus defective in the J2R locus is lower than the neutralization rate measured in the same conditions and at the same time post-infection of the variant parental Vaccinia virus strain Copenhagen (COP) defective in the J2R locus; and
[0572] optionally, the complement-mediated virus neutralization rate of said variant chimeric poxvirus defective in J2R locus is lower than the complement-mediated virus neutralization rate measured in the same conditions of the parental Vaccinia virus strain Copenhagen (COP) defective in J2R locus.

[0573] A more particularly preferred variant chimeric poxvirus defective in the J2R locus according to the invention comprises the following functional features:
[0574] for at least one organ, the therapeutic index of said variant chimeric poxvirus defective in the J2R locus is higher than the therapeutic index measured in the same conditions and at the same time post-infection of the variant parental Vaccinia virus strain Copenhagen (COP) defective in the J2R locus;
[0575] for at least one producer cell (preferably a tumor cell), the EEV-SC of said variant chimeric poxvirus defective in the J2R locus is higher than the EEV-SC measured in the same conditions and at the same time post-infection of the variant parental Rabbitpox virus strain Utrecht (RPX) defective in the J2R locus or the Vaccinia virus strain IHD-J;
[0576] for at least one producer cell (preferably a tumor cell), the syncytia formation capacity of said variant chimeric poxvirus defective in J2R locus is higher than the syncytia formation capacity measured in the same conditions and at the same time post-infection of the parental Vaccinia virus strain Copenhagen (COP) defective in J2R locus;
[0577] optionally, for at least one poxvirus-specific antibody and tumor, the neutralization rate of said variant chimeric poxvirus defective in the J2R locus is lower than the neutralization rate measured in the same conditions and at the same time post-infection of the variant parental Vaccinia virus strain Copenhagen (COP) defective in the J2R locus; and
[0578] optionally, the complement-mediated virus neutralization rate of said variant chimeric poxvirus defective in J2R locus is lower than the complement-mediated virus neutralization rate measured in the same conditions of the parental Vaccinia virus strain Copenhagen (COP) defective in J2R locus.

[0579] Any variant chimeric poxvirus defective in the J2R locus combining several functional features as described above may further have at least 99%, at least 99,1%, at least 99,2%, at least 99,3%, at least 99,4%, at least 99,5%, at least 99,6%, at least 99,7%, at least 99,8%, at least 99,9%, at least 99,91%, at least 99,92%, at least 99,93%, at least 99,94%, at least 99,95%, at least 99,96%, at least 99,97%, at least 99,98%, at least 99,99%, or even 100% of identity with SEQ ID NO:8.

Variant Chimeric Poxvirus Defective in the 14L and/or F4L Locus

[0580] In another embodiment, the variant chimeric poxvirus of the invention is defective in at least one of the ribonucleotide reductase (RR) loci, where are located the RR encoding-genes: 14L encoding-gene (similar to 14L gene in COP) and F4L encoding-gene (similar to F4L gene in COP). In the natural context, the ribonucleotide reductase enzyme catalyzes the reduction of ribonucleotides to deoxyribonucleotides that represents a crucial step in DNA biosynthesis. The viral enzyme is similar in subunit structure to the mammalian enzyme, being composed of two heterologous subunits, designed 14L and F4L. In the context of the invention, either the locus encoding the R1 large subunit, or the locus encoding the R2 small subunit, or both may be defective.

[0581] In an embodiment, the variant chimeric poxvirus of the invention is defective in the 14L locus. Alternatively, the variant chimeric poxvirus of the invention is defective in the F4L locus, or in both the 14L and the F4L loci.

Variant Chimeric Poxvirus Defective in the J2R Locus and Defective in the 14L and/or F4L Locus

[0582] In a preferred embodiment, the variant chimeric poxvirus of this invention may be defective in the J2R locus and in one or both of the 14L and F4L loci. Such a double deleted variant chimeric poxvirus is defective for both TK and RR activities (e.g.: as described in WO2009/065546 and Foloppe et al., 2008, Gene Ther., 15:1361-1371). Double J2R and one or both of 14L and F4L deleted variant chimeric poxviruses are thus particularly advantageous due to low replication in healthy cells (preferably primary cells) and higher therapeutic index than the corresponding wild-type chimeric poxviruses.

[0583] Preferably, the variant chimeric poxvirus has at least 99%, at least 99,1%, at least 99,2%, at least 99,3%, at least 99,4%, at least 99,5%, at least 99,6%, at least 99,7%, at least 99,8%, at least 99,9%, at least 99,91%, at least 99,92%, at least 99,93%, at least 99,94%, at least 99,95%, at least 99,96%, at least 99,97%, at least 99,98%, at least 99,99%, or even 100% of identity with SEQ ID NO:9. SEQ ID NO:9 is the sequence of the core region and one of the ITRs of POXSTG19730, which corresponds to POXSTG19503, except that the GFP::FCU1 sequence has been inserted into the J2R locus and mCherry gene under the control of the pH5R promoter has been inserted into the 14L locus.

[0584] More preferably, the variant chimeric poxvirus has at least 99%, at least 99,1%, at least 99,2%, at least 99,3%, at least 99,4%, at least 99,5%, at least 99,6%, at least 99,7%, at least 99,8%, at least 99,9%, at least 99,91%, at least 99,92%, at least 99,93%, at least 99,94%, at least 99,95%, at least 99,96%, at least 99,97%, at least 99,98%, at least 99,99%, or even 100% of identity with SEQ ID NO: 10. SEQ ID NO:10 is the sequence of the core region and one of the ITRs of POXSTG20150, which corresponds to POXSTG19503 after the deletion of J2R gene sequence encoding TK protein and 14L gene sequence encoding for the large subunit of the RR protein.

[0585] Even more preferably, the variant chimeric poxvirus is strain POXSTG19503 having accession number CNCM-I-5913 and is defective in the J2R locus and defective in the 14L and/or F4L locus.

[0586] Alternatively, or in combination, a variant chimeric poxvirus defective in the J2R and one or both of the 14L and F4L loci (preferably the 14L locus) preferably comprises the following functional features or combinations of functional features:
[0587] a) for at least one tumor, the oncolytic power of a variant chimeric poxvirus defective in the J2R locus and in one or both of the 14L and F4L loci according to the invention is higher than the oncolytic power measured in the same conditions and at the same time post-infection of at least one (preferably the variant oncolytic parental COP defective in the J2R locus and in one or both of the 14L and F4L loci), at least two, at least three, at least four or all five of the variant oncolytic parental poxvirus strains Rabbitpox virus strain Utrecht (RPX), Cowpox virus strain Brighton (CPX), Vaccinia virus strain Copenhagen (COP), Vaccinia virus strain Wyeth (WY) and Vaccinia virus strain Western Reserve (WR) defective in the J2R locus and in one or both of the 14L and F4L loci;
[0588] b) for at least one healthy cell (preferably primary cell), the viral replication in the healthy cell (preferably primary cell) of the variant chimeric poxvirus defective in the J2R locus and in one or both of the 14L and F4L loci is lower than that of at least one (preferably the variant oncolytic parental COP defective in the J2R locus and in one or both of the 14L and F4L loci), at least two, at least three, at least four or all five of the variant oncolytic parental poxvirus strains Rabbitpox virus strain Utrecht (RPX), Cowpox virus strain Brighton (CPX), Vaccinia virus strain Copenhagen (COP), Vaccinia virus strain Wyeth (WY) and Vaccinia virus strain Western Reserve (WR) all defective in the J2R locus and in one or both of the 14L and F4L loci;
[0589] c) for at least one producer cell (preferably a tumor cell), the EEV-SC of a variant chimeric poxvirus defective in the J2R locus and in one or both of the 14L and F4L loci is higher than the EEV-SC measured in the same conditions and at the same time post-infection of at least one (preferably the variant oncolytic parental COP defective in the J2R locus and in one or both of the 14L and F4L loci), at least two, at least three, at least four, at least five or all six of the variant parental poxvirus strains Rabbitpox virus strain Utrecht (RPX), Cowpox virus strain Brighton (CPX), Vaccinia virus strain Copenhagen (COP), Vaccinia virus strain Wyeth (WY), Vaccinia virus strain Western Reserve (WR) and Modified Vaccinia Virus Ankara (MVA) all defective in the J2R locus and in one or both of the 14L and F4L loci;
[0590] d) for at least one tumor, the spreading capacity of a variant chimeric poxvirus defective in the J2R locus and in one or both of the 14L and F4L loci is higher than the spreading capacity measured in the same conditions and at the same time post-infection of at least one (preferably the variant oncolytic parental COP defective in the J2R locus and in one or both of the 14L and F4L loci), at least two, at least three, at least four, at least five or all six of the variant parental poxvirus strains Rabbitpox virus strain Utrecht (RPX), Cowpox virus strain Brighton (CPX), Vaccinia virus strain Copenhagen (COP), Vaccinia virus strain Wyeth (WY), Vaccinia virus strain Western Reserve (WR) and Modified Vaccinia Virus Ankara (MVA) all defective in the J2R locus and in one or both of the 14L and F4L loci;
[0591] e) for at least one poxvirus-specific antibody and tumor, the neutralization rate of a variant chimeric poxvirus defective in the J2R locus and in one or both of the 14L and F4L loci is lower than the neutralization rate measured in the same conditions and at the same time post-infection of at least one (preferably the variant oncolytic parental COP defective in the J2R locus and in one or both of the 14L and F4L loci), at least two, at least three, at least four, at least five or all six of the variant parental poxvirus strains RPX, CPX, COP, WY, WR and MVA all defective in the J2R locus and in one or both of the 14L and F4L loci;
[0592] f) the complement-mediated virus neutralization rate of a variant chimeric poxvirus defective in the J2R locus and in one or both of the 14L and F4L loci is lower than the complement-mediated virus neutralization rate measured in the same conditions of at least one (preferably the variant oncolytic parental COP defective in the J2R locus and in one or both of the 14L and F4L loci), at least two, at least three, at least four, at least five or all six of the variant parental poxvirus strains RPX, CPX, COP, WY, WR and MVA all defective in the J2R locus and in one or both of the 14L and F4L loci;
[0593] g) for at least one producer cell (preferably a tumor cell), the syncytia formation capacity of a variant chimeric poxvirus defective in the J2R locus and in one or both of the 14L and F4L loci is higher than the syncytia formation capacity measured in the same conditions and at the same time post-infection of at least one (preferably the variant oncolytic parental COP defective in the J2R locus and in one or both 14L and F4L loci), at least two, at least three, at least four, at least five or at least six of the variant parental poxvirus strains Rabbitpox virus strain Utrecht (RPX), Cowpox virus strain Brighton (CPX), Vaccinia virus strain Copenhagen (COP), Vaccinia virus strain Wyeth (WY), Vaccinia virus strain Western Reserve (WR) and Modified Vaccinia Virus Ankara (MVA) all defective in the J2R locus and in one or both of the 14L and F4L loci;
[0594] h) a) and b);
[0595] i) a) and (c) or d) or e) or f) or g));
[0596] j) a), b) and (c) or d) or e) or f) or g)), preferably a), b) and c), or a), b), and g);
[0597] k) a), b), c) and (e) or f) or g)), preferably a), b), c) and f); or a), b), c) and e);
[0598] l) a), b), g) and (e) or f));
[0599] m) a), b), c), e) and (f) or g));
[0600] n) a), b), c), f) and g);
[0601] o) a), b), e), f) and g);
[0602] p) a), b), c), e), f) and g), and
[0603] q) any combination thereof.

[0604] Alternatively, a variant chimeric poxvirus defective in the J2R and one or both of the 14L and F4L loci (preferably the 14L locus) preferably comprises the following functional features or combinations of functional features:
[0605] a) for at least one organ, the therapeutic index of said variant chimeric poxvirus defective in the J2R locus and in one or both of the 14L and F4L loci is higher than the therapeutic index measured in the same conditions and at the same time post-infection of at least one (preferably the variant oncolytic parental COP defective in the J2R locus and in one or both of the 14L and F4L loci), at least two, at least three, at least four, at least five or all six of the variant parental oncolytic poxvirus strains Rabbitpox virus strain Utrecht (RPX), Cowpox virus strain Brighton (CPX), Vaccinia virus strain Copenhagen (COP), Vaccinia virus strain Wyeth (WY) and Vaccinia virus strain Western Reserve (WR) all defective in the J2R locus and in one or both of the 14L and F4L loci;
[0606] b) for at least one producer cell (preferably a tumor cell), the EEV-SC of a variant chimeric poxvirus defective in the J2R locus and in one or both of the 14L and F4L loci is higher than the EEV-SC measured in the same conditions and at the same time post-infection of at least one (preferably the variant oncolytic parental COP defective in the J2R locus and in one or both of the 14L and F4L loci), at least two, at least three, at least four, at least five or all six of the variant parental poxvirus strains Rabbitpox virus strain Utrecht (RPX), Cowpox virus strain Brighton (CPX), Vaccinia virus strain Copenhagen (COP), Vaccinia virus strain Wyeth (WY), Vaccinia virus strain Western Reserve (WR) and Modified Vaccinia Virus Ankara (MVA) all defective in the J2R locus and in one or both of the 14L and F4L loci;
[0607] c) for at least one tumor, the spreading capacity of a variant chimeric poxvirus defective in the J2R locus and in one or both of the 14L and F4L loci is higher than the spreading capacity measured in the same conditions and at the same time post-infection of at least one (preferably the variant oncolytic parental COP defective in the J2R locus and in one or both of the 14L and F4L loci), at least two, at least three, at least four, at least five or all six of the variant parental poxvirus strains Rabbitpox virus strain Utrecht (RPX), Cowpox virus strain Brighton (CPX), Vaccinia virus strain Copenhagen (COP), Vaccinia virus strain Wyeth (WY), Vaccinia virus strain Western Reserve (WR) and Modified Vaccinia Virus Ankara (MVA) all defective in the J2R locus and in one or both of the 14L and F4L loci;
[0608] d) for at least one poxvirus-specific antibody and tumor, the neutralization rate of a variant chimeric poxvirus defective in the J2R locus and in one or both of the 14L and F4L loci is lower than the neutralization rate measured in the same conditions and at the same time post-infection of at least one (preferably the variant oncolytic parental COP defective in the J2R locus and in one or both of the 14L and F4L loci), at least two, at least three, at least four, at least five or all six of the variant parental poxvirus strains RPX, CPX, COP, WY, WR and MVA all defective in the J2R locus and in one or both of the 14L and F4L loci;
[0609] e) the complement-mediated virus neutralization rate of a variant chimeric poxvirus defective in the J2R locus and in one or both of the 14L and F4L loci is lower than the complement-mediated virus neutralization rate measured in the same conditions of at least one (preferably the variant oncolytic parental COP defective in the J2R locus and in one or both of the 14L and F4L loci), at least two, at least three, at least four, at least five or all six of the variant parental poxvirus strains RPX, CPX, COP, WY, WR and MVA all defective in the J2R locus and in one or both of the 14L and F4L loci;
[0610] f) for at least one producer cell (preferably a tumor cell), the syncytia formation capacity of a variant chimeric poxvirus defective in the J2R locus and in one or both of the 14L and F4L loci is higher than the syncytia formation capacity measured in the same conditions and at the same time post-infection of at least one (preferably the variant oncolytic parental COP defective in the J2R locus and in one or both of the 14L and F4L loci), at least two, at least three, at least four, at least five or all six of the variant parental poxvirus strains Rabbitpox virus strain Utrecht (RPX), Cowpox virus strain Brighton (CPX), Vaccinia virus strain Copenhagen (COP), Vaccinia virus strain Wyeth (WY), Vaccinia virus strain Western Reserve (WR) and Modified Vaccinia Virus Ankara (MVA) all defective in the J2R locus and in one or both of the 14L and F4L loci;
[0611] g) a) and (b) or c) or d) or e) or f)), preferably a) and b);
[0612] h) a), b) and (d) or e) or f)), preferably a), b) and d), or a), b) and e), or a), b) and f);
[0613] i) a), d) and (e) or f));
[0614] j) a), e) and f);
[0615] k) a), b), d) and (e) or f));
[0616] I) a), b), d) and e);
[0617] m) a), b), e) and f);
[0618] n) a), d), e) and f);
[0619] o) a), b), d), e), and f); and
[0620] p) any combination thereof.
   Further Viral Genes that May be Altered in the Variant Chimeric Poxvirus of the Invention

[0621] Alternatively, or in combination with deficiency in the J2R locus, in one or both of the 14L and F4L loci, or in the J2R locus and in one or both of the 14L and F4L loci, the variant chimeric poxvirus of the invention may be further defective in the M2L locus (preference for modification leading to a suppressed expression of the viral m2 protein, such as M2L locus deletion).

[0622] In one embodiment, the variant chimeric poxvirus is defective in the J2R locus (preference for modification resulting in a suppressed expression of the viral TK protein) and in the M2L locus (preference for modification leading to a suppressed expression of the viral m2 protein), resulting in a variant chimeric poxvirus defective for both m2 and TK functions (m2-tk-variant chimeric poxvirus). Partial or complete deletion of said M2L locus and/or J2R locus as well as insertion of foreign nucleic acid in the M2L locus and/or J2R locus are contemplated in the context of the present invention to inactivate m2 and tk functions.

[0623] In another embodiment the variant chimeric poxvirus is defective in one or both or the 14L and F4L loci (preference for modification leading to a suppressed expression of the viral ribonucleotide reductase (RR) protein) and in the M2L locus (preference for modification leading to a suppressed expression of the viral m2 protein), resulting in a chimeric poxvirus defective for both m2 and rr functions (m2 and rr-defective variant chimeric poxvirus). In the context of the invention, the variant chimeric poxvirus can be modified either in the 14L gene (encoding the R1 large subunit) or in the F4L gene (encoding the R2 small subunit) or both to provide a RR-defective variant chimeric poxvirus. E.g.: by partial or complete deletion of said 14L and/or F4L locus/loci.

[0624] In another embodiment, the variant chimeric poxvirus is defective in the J2R locus, in one or both of the 14L and F4L loci, and in the M2L locus (triple defective virus with modifications in the M2L, J2R and 14L loci; M2L, J2R and F4L loci or M2L, J2R, 14L and F4L loci), resulting in a variant chimeric poxvirus defective for M2, TK and RR activities (m2-, tk-, rr-variant chimeric poxvirus).

[0625] Alternatively, or in combination with alteration of one or more of the J2R locus, the 14L and/or F4L locus, and the M2 locus, the variant chimeric poxvirus of this invention may be defective for dUTPase resulting from alteration of the dUTPase encoding-gene (similar to F2L gene in COP).

[0626] Alternatively, or in combination, other strategies may also be pursued to further increase the virus tumor-specificity. A representative example of suitable modification includes disruption of the hemagglutinin encoding-gene (similar to A56R gene in COP), optionally in combination with J2R deletion (Zhang et al., 2007, Cancer Res. 67:10038-46). Disruption of interferon modulating gene(s) may also be advantageous (similar to B8R or B18R genes in COP) or the caspase-1 inhibitor (similar to B13R gene in COP). Another suitable modification comprises the disruption of the gene encoding the viral dUTPase involved in both maintaining the fidelity of DNA replication and providing the precursor for the production of TMP by thymidylate synthase (Broyles et al., 1993, Virol. 195:863-5).

### Recombinant Chimeric Poxvirus Encoding Heterologous Nucleic Acid(S) of Interest

[0627] Any chimeric poxvirus of the invention (either wild-type or variant as described above) may further comprise one or more heterologous nucleic acid(s) of interest inserted in its genome. The invention thus also provides a recombinant (either wild-type or variant as described above) chimeric poxvirus, further comprising one or more heterologous nucleic acid(s) of interest inserted in its genome.

[0628] According to the invention, the heterologous nucleic acid(s) of interest can originate from Prokaryotes (comprising the kingdoms of Bacteria, Archaea), Acaryotes (comprising the viruses) or

[0629] Eukaryotes (comprising the kingdoms of Protista, Fungi, Plantae, Animalia). Advantageously, said nucleic acid of interest encodes all or part of a polypeptide. A polypeptide is understood to be any translational product of a polynucleotide regardless of size, and whether glycosylated or not, and includes peptides and proteins.

[0630] In one embodiment, the nucleic acid of interest encodes a polypeptide of therapeutic interest, which is capable of providing a biological activity when administered appropriately to a subject or which is expected to cause a beneficial effect on the course or a symptom of the pathological condition to be treated. A vast number of nucleic acids of interest may be envisaged in the context of the invention such as those encoding polypeptides that can compensate for defective or deficient proteins in the subject, or those that act through toxic effects to limit or remove harmful cells from the body or those that encode immunity conferring polypeptides. They may be native or obtained from the latter by mutation, deletion, substitution and/or addition of one or more nucleotides. Representative examples of suitable polypeptides of therapeutic interest include, without limitation, polypeptides capable of potentiating anti-tumor efficacy (such as immunostimulatory polypeptides), as well as antigens for inducing or activating an immune humoral and/or cellular response, suicide polypeptides which are capable of reinforcing the oncolytic nature of the chimeric poxvirus of the present invention, or permease to increase the cellular nucleoside or nucleotide pool among many others. The present invention also encompasses chimeric poxvirus expressing two or more polypeptides of interest as described herein, e.g.: at least two antigens, at least one antigen and one cytokine, at least two antigens and one cytokine, etc.

### Immunostimulatory Polypeptide

[0631] A specific embodiment of the invention is directed to a recombinant (wild-type or variant) chimeric poxvirus comprising an immunostimulatory polypeptide. As used herein, the term “immunostimulatory polypeptide” refers to a polypeptide, or protein, which has the ability to stimulate the immune system, in a specific or non-specific way. A vast number of proteins are known in the art for their ability to exert an immunostimulatory effect. Examples of suitable immunostimulatory proteins in the context of the invention include, without limitation, immune checkpoint inhibitors, including, but not limited to anti-PD1, anti-PDL1, anti-PDL-2, anti-CTLA4, anti-Tim3, anti-LAG3, anti-BTLA; cytokines, like alpha, beta or gamma interferon, interleukins or tumor necrosis factor; agents that affect the regulation of cell surface receptors such as, e.g. inhibitors of Epidermal Growth Factor Receptor (in particular cetuximab, panitumumab, zalutumumab, nimotuzumab, matuzumab, gefitinib, erlotinib or lapatinib) or inhibitors of Human Epidermal Growth Factor Receptor-2 (in particular trastuzumab); agents that affect angiogenesis such as, e.g. inhibitor of Vascular Endothelial Growth Factor (in particular bevacizumab or ranibizumab); agents that stimulate stem cells to produce granulocytes, macrophages such as, e.g. granulocyte macrophage-colony stimulating factor and B7 proteins. In a preferred embodiment, said nucleic acid of interest is a cytokine, more preferably an interleukin, even more preferably an IL-12.

[0632] In a preferred embodiment of the invention, a recombinant variant chimeric poxvirus is defective in the J2R locus and further encodes an interleukin. In a more preferred embodiment, a recombinant variant chimeric poxvirus is defective in the J2R locus and further encodes an IL-12.

[0633] In a preferred embodiment of the invention, a recombinant variant chimeric poxvirus is defective in the J2R and one or both of the F4L and 14L loci, and further encodes an interleukin. In a more preferred embodiment, a recombinant variant chimeric poxvirus is defective in the J2R and in one or both of the F4L and 14L loci and further encodes an IL-12.

### Antigens

[0634] Another embodiment of the invention is directed to a recombinant (wild-type or variant) chimeric poxvirus encoding an antigen. The term “antigen” generally refers to a substance that is recognized and selectively bound by an antibody or by a T cell antigen receptor, in order to trigger an immune response. It is contemplated that the term antigen encompasses native antigen as well as fragment (e.g.: epitopes, immunogenic domains, etc.) and analogue thereof, provided that such fragment or analogue is capable of being the target of an immune response. Suitable antigens in the context of the invention are preferably polypeptides (e.g.: peptides, polypeptides, post translationally modified polypeptides, etc.) including one or more B cell epitope(s) or one or more T cell epitope(s) or both B and T cell epitope(s) and capable of raising an immune response, preferably, a humoral or cell response that can be specific for that antigen. Typically, the one or more antigen(s) is selected in connection with the disease to treat. Preferred antigens for use herein are cancer antigens and antigens of tumor-inducing pathogens.

[0635] In certain embodiments, the antigen(s) encoded by the recombinant chimeric poxvirus is/are cancer antigen(s) (also called tumor-associated antigens) that is associated with and/or serve as markers for cancers. Cancer antigens encompass various categories of polypeptides, e.g. those which are normally silent (i.e. not expressed) in healthy cells (preferably primary cells), those that are expressed only at low levels or at certain stages of differentiation and those that are temporally expressed such as embryonic and fetal antigens as well as those resulting from mutation of cellular genes, such as oncogenes (e.g. activated ras oncogene), proto-oncogenes (e.g. ErbB family), or proteins resulting from chromosomal translocations. The cancer antigens also encompass antigens encoded by pathogenic organisms (bacteria, viruses, parasites, fungi, viroids or prions) that are capable of inducing a malignant condition in a subject (especially chronically infected subject) such as RNA and DNA tumor viruses (e.g.: HPV, HCV, EBV, etc.) and bacteria (e.g.: Helicobacter pilori). Cancer antigens can also be neoantigens, which are specific for a patient's tumor, and used for personalized medicine (EP2018/066668).

[0636] Some non-limiting examples of cancer antigens include, without limitation, MART-1/Melan-A, gp100, Dipeptidyl peptidase IV (DPPIV), cyclophilin b, Colorectal associated antigen, Carcinoembryonic Antigen (CEA), Prostate Specific Antigen (PSA), prostate-specific membrane antigen (PSMA), T-cell receptor/CD3-zeta chain, MAGE-family of tumor antigens, GAGE-family of tumor antigens, BAGE, RAGE, LAGE-1, NAG, GnT-V, MUM-1, CDK4, tyrosinase, p53, MUC family (e.g. MUC1, MUC16, etc.; see e.g. U.S. Pat. No. 6,054,438; WO98/04727; or WO98/37095), HER2/neu, p21ras, alpha-fetoprotein, E-cadherin, catenin family, and viral antigens such as the HPV-16 and HPV-18 E6 and E7 antigens.

[0637] Other antigens suitable for use in this invention are marker antigens (beta-galactosidase, luciferase, green fluorescent proteins, etc.).

### Suicide Polypeptide

[0638] In one embodiment, the recombinant (wild-type or variant) chimeric poxvirus of the invention may encode at least a suicide polypeptide. The term “suicide polypeptide” refers to a polypeptide able to convert a precursor of a drug, also named “prodrug”, into a cytotoxic compound. Examples of suicide polypeptides suitable for use herein and corresponding prodrugs are disclosed in the following table:

| Suicide polypeptide | Prodrug |
|---|---|
| Thymidine Kinase | Ganciclovir; |
| | Ganciclovir elaidic acid ester; |
| | Penciclovir; |
| | Acyclovir; |
| | Valacyclovir; |
| | I-5-(2-bromovinyl)-2′-deoxyuridine; |
| | Zidovudine; |
| | 2′-Exo-methanocarbathymidine |
| Cytosine deaminase | 5-Fluorocytosine |
| Purine nucleoside phosphorylase | 6-Methylpurine deoxyriboside; |
| | Fludarabine |
| Uracil phosphoribosyl transferase | 5-Fluorocytosine; |
| | 5-Fluorouracil |
| Thymidylate kinase | Azidothymidine |

[0639] In this embodiment, for at least one tumor, the oncolytic power of said recombinant chimeric poxvirus encoding a suicide polypeptide is higher than the oncolytic power measured in the same conditions and at the same time post-infection of at least one of the oncolytic recombinant parental poxvirus strains Rabbitpox virus strain Utrecht (RPX), Cowpox virus strain Brighton (CPX), Vaccinia virus strain Copenhagen (COP), Vaccinia virus strain Wyeth (WY) and Vaccinia virus strain Western Reserve (WR) encoding a suicide polypeptide. In a preferred embodiment, for at least one tumor, the oncolytic power measured in the same conditions and at the same time post-infection of the recombinant parental Vaccinia virus strain Copenhagen (COP) encoding a suicide gene or the recombinant parental Rabbitpox virus strain Utrecht (RPX) encoding a suicide gene. More preferably, for at least one tumor, the oncolytic power of said recombinant chimeric poxvirus encoding a suicide gene is higher than the oncolytic power measured in the same conditions and at the same time post-infection of at least two of the recombinant oncolytic parental poxvirus strains Rabbitpox virus strain Utrecht (RPX), Cowpox virus strain Brighton (CPX), Vaccinia virus strain Copenhagen (COP), Vaccinia virus strain Wyeth (WY) and Vaccinia virus strain Western Reserve (WR) encoding a suicide gene. For instance, for at least one tumor, the oncolytic power of said recombinant chimeric poxvirus encoding a suicide gene is higher than the oncolytic powers measured in the same conditions and at the same time post-infection of the recombinant parental Vaccinia virus strain Copenhagen (COP) encoding a suicide gene and the recombinant parental Rabbitpox virus strain Utrecht (RPX) encoding a suicide gene. In a more preferred embodiment, for at least one tumor, the oncolytic power of said recombinant chimeric poxvirus encoding a suicide gene is higher than the oncolytic power measured in the same conditions and at the same time post-infection of at least three, more preferably higher than at least four, and even more preferably higher than each of the five oncolytic recombinant parental poxvirus strains Rabbitpox virus strain Utrecht (RPX), Cowpox virus strain Brighton (CPX), Vaccinia virus strain Copenhagen (COP), Vaccinia virus strain Wyeth (WY) and Vaccinia virus strain Western Reserve (WR) encoding a suicide gene.

[0640] Alternatively, or in combination, the invention provides a recombinant chimeric poxvirus encoding a suicide polypeptide, wherein for at least one healthy cell (preferably primary cell), the viral replication in the healthy cell of said chimeric recombinant poxvirus encoding a suicide polypeptide is lower than at least one of the five oncolytic recombinant parental poxvirus strains RPX, CPX, COP, WY and WR encoding a suicide polypeptide, preferably lower than the recombinant parental COP encoding a suicide gene or the recombinant parental RPX encoding a suicide gene, more preferably lower than at least two of the recombinant oncolytic parental poxvirus strains RPX, CPX, COP, WY and WR encoding a suicide gene (e.g.: the recombinant parental COP encoding a suicide gene and the recombinant parental RPX encoding a suicide gene), more preferably lower than at least three, more preferably lower than at least four, and even more preferably lower than each of the five oncolytic recombinant parental poxvirus strains RPX, CPX, COP, WY and WR encoding a suicide gene.

[0641] Alternatively, or in combination, the invention provides a recombinant chimeric poxvirus encoding a suicide polypeptide, wherein for at least one organ, the therapeutic index of said recombinant chimeric poxvirus encoding a suicide polypeptide is higher than the therapeutic index measured in the same conditions and at the same time post-infection of at least one of the oncolytic recombinant parental poxvirus strains RPX, CPX, COP, WY and WR encoding a suicide polypeptide, preferably higher than the therapeutic index measured in the same conditions and at the same time post-infection of the recombinant parental COP encoding a suicide gene or the recombinant parental RPX encoding a suicide gene, more preferably higher than the therapeutic index measured in the same conditions and at the same time post-infection of at least two of the recombinant oncolytic parental poxvirus strains RPX, CPX, COP, WY and WR encoding a suicide gene (e.g.: the recombinant parental COP encoding a suicide gene and the recombinant parental RPX encoding a suicide gene), more preferably higher than the therapeutic index measured in the same conditions and at the same time post-infection of at least three, more preferably of at least four, and even more preferably of each of the five oncolytic recombinant parental poxvirus strains RPX, CPX, COP, WY and WR encoding a suicide gene.

[0642] Alternatively, or in combination, the invention provides a recombinant chimeric poxvirus encoding a suicide polypeptide, wherein for at least one producer cell (preferably a tumor cell), the EEV-SC of said recombinant chimeric poxvirus encoding a suicide polypeptide is higher than the EEV-SC measured in the same conditions and at the same time post-infection of at least one of the recombinant parental poxvirus strains RPX, CPX, COP, WY, WR and MVA encoding a suicide polypeptide, preferably higher than the EEV-SC measured in the same conditions and at the same time post-infection of at least two of the recombinant parental poxvirus strains RPX, CPX, COP, WY, WR and MVA encoding a suicide gene (e.g.: the recombinant parental COP encoding a suicide gene and the recombinant parental RPX encoding a suicide gene), even more preferably higher than the EEV-SC measured in the same conditions and at the same time post-infection of at least three, preferably of least four, more preferably of at least five, even more preferably of each of the six recombinant parental poxvirus strains RPX, CPX, COP, WY, WR and MVA encoding a suicide gene.

[0643] Alternatively, or in combination, the invention provides a recombinant chimeric poxvirus encoding a suicide polypeptide wherein, for at least one tumor cell, the spreading capacity of said recombinant chimeric poxvirus encoding a suicide polypeptide is higher than the spreading capacity measured in the same conditions and at the same time post-infection of at least one of the recombinant parental poxvirus strains RPX, CPX, COP, WY, WR and MVA encoding a suicide polypeptide, preferably higher than the spreading capacity measured in the same conditions and at the same time post-infection of the recombinant parental COP encoding a suicide gene or the recombinant parental RPX encoding a suicide gene, more preferably higher than the spreading capacity measured in the same conditions and at the same time post-infection of at least two of the recombinant parental poxvirus strains RPX, CPX, COP, WY, WR and MVA encoding a suicide gene (e.g.: the recombinant parental COP encoding a suicide gene and the recombinant parental RPX encoding a suicide gene), even more preferably higher than the spreading capacity measured in the same conditions and at the same time post-infection of at least three, preferably of at least four, more preferably of at least five, even more preferably of each of the six recombinant parental poxvirus strains RPX, CPX, COP, WY, WR and MVA encoding a suicide gene.

[0644] Alternatively, or in combination, the invention provides a recombinant chimeric poxvirus encoding a suicide polypeptide wherein, for at least one poxvirus-specific antibody and tumor, the neutralization rate of said recombinant chimeric poxvirus encoding a suicide polypeptide is lower than the neutralization rate measured in the same conditions and at the same time post-infection of at least one of the recombinant parental poxvirus strains RPX, CPX, COP, WY, WR and MVA encoding a suicide polypeptide, preferably lower than the neutralization rate measured in the same conditions and at the same time post-infection of the recombinant parental COP encoding a suicide gene or the recombinant parental RPX encoding a suicide gene, more preferably lower than the neutralization rate measured in the same conditions and at the same time post-infection of at least two of the recombinant parental poxvirus strains RPX, CPX, COP, WY, WR and MVA encoding a suicide gene (e.g.: the recombinant parental COP encoding a suicide gene and the recombinant parental RPX encoding a suicide gene), even more preferably lower than the neutralization rate measured in the same conditions and at the same time post-infection of at least three, preferably of at least four, more preferably of at least five, and even more preferably of each of the six recombinant parental poxvirus strains RPX, CPX, COP, WY, WR and MVA encoding a suicide gene.

[0645] Alternatively, or in combination, the invention provides a recombinant chimeric poxvirus encoding a suicide polypeptide wherein the complement-mediated virus neutralization rate of said recombinant chimeric poxvirus encoding a suicide polypeptide is lower than the complement-mediated virus neutralization rate measured in the same conditions of at least one of the recombinant parental poxvirus strains RPX, CPX, COP, WY, WR and MVA all encoding a suicide polypeptide, preferably lower than the complement-mediated virus neutralization rate measured in the same conditions of the recombinant parental COP encoding a suicide gene, more preferably lower than the complement-mediated virus neutralization rate measured in the same conditions of at least two of the recombinant parental poxvirus strains RPX, CPX, COP, WY, WR and MVA all encoding a suicide gene (e.g.: the recombinant parental COP encoding a suicide gene and the recombinant parental RPX encoding a suicide gene), even more preferably lower than the complement-mediated virus neutralization rate measured in the same conditions of at least three, preferably of at least four, more preferably of at least five, and even more preferably of each of the six recombinant parental poxvirus strains RPX, CPX, COP, WY, WR and MVA all encoding a suicide gene.

[0646] Alternatively, or in combination, the invention provides a recombinant chimeric poxvirus encoding a suicide polypeptide, wherein for at least one producer cell (preferably a tumor cell), the syncytia formation capacity of said recombinant chimeric poxvirus encoding a suicide polypeptide is higher than the syncytia formation capacity measured in the same conditions and at the same time post-infection of at least one of the recombinant parental poxvirus strains RPX, CPX, COP, WY, WR and MVA all encoding a suicide polypeptide, preferably higher than the syncytia formation capacity measured in the same conditions and at the same time post-infection of at least two of the recombinant parental poxvirus strains RPX, CPX, COP, WY, WR and MVA all encoding a suicide gene (e.g.: the recombinant parental COP encoding a suicide gene and the recombinant parental RPX encoding a suicide gene), even more preferably higher than the syncytia formation capacity measured in the same conditions and at the same time post-infection of at least three, preferably of least four, more preferably of at least five, even more preferably of each of the six recombinant parental poxvirus strains RPX, CPX, COP, WY, WR and MVA all encoding a suicide gene.

[0647] Preferably, the recombinant chimeric poxvirus of the invention carries in its genome a gene encoding a suicide polypeptide having at least a cytosine deaminase (CDase) activity. Alternatively, or in combination, the recombinant chimeric poxvirus of the invention carries in its viral genome a gene encoding a suicide polypeptide having uracil phosphoribosyl transferase (UPRTase) activity. CDase converts 5-fluorocytosine (5-FC), thereby forming cytotoxic 5-fluorouracil (5-FU), which is then converted into the even more toxic 5-fluoro-UMP (5-FUMP). Preferably, the recombinant chimeric poxvirus of the invention encodes a suicide polypeptide engineered by fusion of two enzymatic domains, one having the CDase activity and the second having the UPRTase activity. Exemplary polypeptides include without limitation fusion polypeptides 86mou::upp, FCY1::FUR1 and FCY1::FUR1 [Delta] 10⁵ (FCU1) and FCU1-8 described in WO96/16183, EP998568 and WO2005/07857. Of particular interest is the FCU1 suicide gene (or FCY1::FUR1 [Delta] 10⁵ fusion) encoding a polypeptide comprising the amino acid sequence represented in the sequence identifier SEQ ID NO: 1 of WO2009/065546.

### Permease

[0648] According to another embodiment, the recombinant (wild-type or variant) chimeric poxvirus of the invention may comprise a nucleic acid of interest encoding a permease.

[0649] As used herein, the term “permease” refers to trans-membranous proteins involved in the translocation of nucleoside and nucleobases. Examples of permeases which are involved in the translocation of nucleosides, nucleoside analogues and nucleobases are hCNT1, hCNT2, hCNT3, hENT1 and hENT2. hCNT1, hCNT2 and hCNT3 proteins translocate nucleosides in a Na+coupled manner with high affinity and some substrate selectivity, being hCNT1 and hCNT2 pyrimidine- and purine-preferring, respectively, and hCNT3 abroad selectivity transporter. hENT1 and hENT2 are unequivocally implicated in the translocation of nucleosides and nucleobases (Pastor-Anglada et al, 2015, Front. Pharmacol., 6 (13): 1-14).

### Other Nucleic Acids of Interest:

[0650] Other nucleic acids of interest include, but are not limited to:
[0651] Nucleoside pool modulators (e.g.: cytidine deaminase, like yeast cytidine deaminase (CDD1) or human cytidine deaminase (hCD) (see EP3562946))
[0652] Agents targeting metabolic immune modulators (e.g.: adenosine deaminase like human adenosine deaminase (huADA1 or huADA2) (see EP17306012.0))
[0653] Apoptotic genes, including pro-apoptotic genes, inhibitors of pro-apoptotic genes, anti-apoptotic genes and inhibitors of anti-apoptotic genes,
[0654] Nucleic acid coding for endonuclease, like restriction enzymes, CRISPR/Cas9
[0655] RNA, including but not limited to target-specific miRNA, shRNA, siRNA.

[0656] The nucleic acid(s) of interest sequences may be easily obtained by cloning, by PCR or by chemical synthesis using conventional techniques. They may be native nucleic acid(s) sequences (e.g.: cDNA) or sequences derived from the latter by mutation, deletion, substitution and/or addition of one or more nucleotides. Moreover, their sequences are described in the literature which can be consulted by persons skilled in the art. The nucleic acid(s) sequences can be inserted at any location of the viral genome, with a specific preference for a non-essential locus (e.g.: within J2R, 14L or F4L loci).

### Expression of the Heterologous Nucleic Acid(s) of Interest

[0657] The heterologous nucleic acid(s) of interest can be independently optimized for providing high level expression in a particular host cell or subject. It has been indeed observed that, the codon usage patterns of organisms are highly non-random, and the use of codons may be markedly different between different hosts. As such nucleic acid(s) might be from bacterial or lower eukaryote origin, they may have an inappropriate codon usage pattern for efficient expression in higher eukaryotic cells (e.g.: human). Typically, codon optimization is performed by replacing one or more “native” (e.g.: bacterial or yeast) codon, corresponding to a codon infrequently used in the host organism of interest, by one or more codon encoding the same amino acid which is more frequently used. It is not necessary to replace all native codons corresponding to infrequently used codons since increased expression can be achieved even with partial replacement.

[0658] Further to optimization of the codon usage, expression in the host cell or subject can further be improved through additional modifications of the nucleic acid sequence. For example, it may be advantageous to prevent clustering of rare, non-optimal codons being present in concentrated areas and/or to suppress or modify “negative” sequence elements which are expected to negatively influence expression levels. Such negative sequence elements include without limitation the regions having very high (>80%) or very low (<30%) GC content; AT-rich or GC-rich sequence stretches; unstable direct or inverted repeat sequences; and/or internal cryptic regulatory elements such as internal TATA-boxes, chi-sites, ribosome entry sites, and/or splicing donor/acceptor sites.

[0659] In a specific embodiment of the present invention, the recombinant chimeric poxvirus comprises the elements necessary for the expression of the heterologous nucleic acid(s) of interest in a host cell subject. Specifically, such nucleic acid(s) is/are operably linked to suitable regulatory elements that allow, contribute or modulate expression in a given host cell or subject, including replication, duplication, transcription, splicing, translation, stability and/or transport of the nucleic acid(s) or its derivative (i.e.: mRNA). As used herein, “operably linked” means that the elements being linked are arranged so that they function in concert for their intended purposes. For example, a promoter is operably linked to a nucleic acid molecule if the promoter effects transcription from the transcription initiation to the terminator of said nucleic acid molecule.

[0660] It will be appreciated by those skilled in the art that the choice of the regulatory sequences can depend on such factors as the nucleic acid molecule itself, the virus into which it is inserted, the host cell or subject, the level of expression desired, etc. The promoter is of special importance. In the context of the invention, it can be constitutive directing expression of the encoded product (e.g.: polypeptide(s) encoded by a cytidine gene) in many types of host cells or specific to certain host cells (e.g.: liver-specific regulatory sequences) or regulated in response to specific events or exogenous factors (e.g.: by temperature, nutrient additive, hormone, etc.) or according to the phase of a viral cycle (e.g.: late or early). One may also use promoters that are repressed during the production step in response to specific events or exogenous factors, in order to optimize the chimeric poxvirus production and circumvent potential toxicity of the expressed polypeptide(s).

[0661] Vaccinia virus promoters are particularly adapted in the context of the invention. Representative examples include without limitation the vaccinia p7.5K, pH5R, p11k7.5 (Erbs et al., 2008, Cancer Gene Ther. 15 (1): 18-28), pSE, pTK, p28, p11, pB2R, pF17R, pA14L, pSE/L, pA35R, pK1L, pPr13.5 (WO2014/063832), pB8R, pF11L, pA44L, pC11R (WO2011/128704), as well as synthetic promoters such as those described in Chakrabarti et al. (1997, Biotechniques, 23:1094-7; Hammond et al., 1997, J. Virol. Methods, 66:135-8; and Kumar and Boyle, 1990, Virology, 179:151-8) as well as early/late chimeric promoters (e.g.: U.S. Pat. Nos. 8,394,385; 8,772,023). Cowpox promoters are also suitable as well (e.g.: the ATI promoter).

[0662] In a preferred embodiment, the IL-12 is inserted in the 14L locus of the recombinant chimeric poxvirus of the invention and placed under the control of the vaccinia pH5R promoter.

[0663] Those skilled in the art will appreciate that the regulatory elements controlling the nucleic acid expression may further comprise additional elements for proper initiation, regulation and/or termination of transcription (e.g. a transcription termination sequences), mRNA transport (e.g. nuclear localization signal sequences), processing (e.g. splicing signals), and stability (e.g. introns and non-coding 5′ and 3′ sequences), translation (e.g. an initiator Met, tripartite leader sequences, IRES ribosome binding sites, signal peptides, etc.), targeting sequences, transport sequences, secretion signal, and sequences involved in replication or integration. Said sequences have been reported in the literature and can be readily obtained by those skilled in the art.

### Process for Producing a Chimeric Poxvirus

[0664] The invention also relates to a process for producing a (wild-type, variant, recombinant or recombinant variant) chimeric poxvirus of the invention, said process comprising:
[0665] (i) infecting a producer cell with the chimeric poxvirus of the invention
[0666] (ii) culturing said infected producer cell under conditions which are appropriate for enabling said chimeric poxvirus particles to be produced, and
[0667] (iii) recovering said chimeric poxvirus particles from the producer cell culture.

[0668] The chimeric poxvirus of the present invention is produced into suitable producer cells using conventional techniques including culturing the transfected or infected host cells under suitable conditions so-as to allow the production of infectious poxviral particles and recovering the produced infectious viral particles from the culture of said cells and optionally purifying said recovered infectious viral particles. Suitable host cells for production of the chimeric poxvirus include without limitation human cells such as HeLa (ATCC), 293 cells (Graham et al., 1997, J. Gen. Virol. 36:59-72), HER96, PER-C6 (Fallaux et al., 1998, Human Gene Ther. 9:1909-17), Monkey cells such as Vero (ATCC CCL-081), CV-1 (ATCC CCL-70) and BSC1 (ATCC CCL-26) cell lines, avian cells such as those described in WO2005/042728, WO2006/108846, WO2008/129058, WO2010/130756, WO2012/001075, etc.), hamster cell lines such as BHK-21 (ATCC CCL-10), primary chicken embryo fibroblasts (CEF) prepared from chicken embryos obtained from fertilized eggs, EB66®, HEK 293, BHK21, or MRC5 cells. Host cells are preferably cultivated in a medium free of animal- or human-derived products, using a chemically defined medium with no product of animal or human origin. Culturing is carried out at a temperature, pH and oxygen content appropriate for the producer cell. Such culturing conditions are within the expertise of one of ordinary skill in the art. If growth factors are present, they are preferably recombinantly produced and not purified from animal material. Suitable animal-free medium media are commercially available, for example VP-SFM medium (Invitrogen) for culturing CEF producer cells. Producer cells are preferably cultivated at a temperature comprised between +30° C. and +38° C. (more preferably at about +37° C.) for between 1 and 8 days (preferably for 1 to 5 days for CEF and 2 to 7 days for immortalized cells) before infection. If needed, several passages of 1 to 8 days may be made in order to increase the total number of cells.

[0669] Producer cells are infected by the chimeric poxvirus with an appropriate multiplicity of infection (MOI), which can be as low as 0.001 (more preferably between 0.05 and 5) to permit productive infection.

[0670] In step ii), infected producer cells are then cultured under appropriate conditions well known to those skilled in the art until progeny viral vector is produced. Culture of infected producer cells is also preferably performed in a chemically defined medium (which may be the same as or different from the medium used for culture of producer cells and/or for infection step) free of animal- or human-derived products at a temperature between +30° C. and +37° C., for 1 to 5 days.

[0671] In step iii), the viral particles may be collected from the culture supernatant and/or the producer cells. Recovery from producer cells (and optionally also from culture supernatant), may require a step allowing the disruption of the producer cell membrane to allow the liberation of the virus from producer cells. The disruption of the producer cell membrane can be induced by various techniques well known to those skilled in the art, including but not limited to, freeze/thaw, hypotonic lysis, sonication, microfluidization, or high-speed homogenization.

[0672] The recovered chimeric poxvirus can be at least partially purified before being used according to the present invention. Various purification steps can be envisaged, including clarification, enzymatic treatment (e.g.: endonuclease such as benzonase, protease), ultracentrifugation (e.g.: sucrose gradient or cesium chloride gradient), chromatographic and filtration steps. Appropriate methods are described in the art (e.g.: WO2007/147528; WO2008/138533, WO2009/100521, WO2010/130753, WO2013/022764).

### Composition

[0673] The invention also relates to a composition (preferentially a pharmaceutical composition) that comprises a therapeutically effective amount of the (wild-type, variant, recombinant or recombinant variant) chimeric poxvirus of the present invention. Preferably, the composition further comprises a pharmaceutically acceptable vehicle. Such a composition may be administered once or several times (e.g.: 2, 3, 4, 5, 6, 7 or 8 times etc.) and via the same or different routes.

[0674] A “therapeutically effective amount” corresponds to the amount of each of the active agents comprised in the composition of the invention that is sufficient for producing one or more beneficial results. Such a therapeutically effective amount may vary as a function of various parameters, e.g.: the mode of administration; the disease state; the age and weight of the subject; the ability of the subject to respond to the treatment; kind of concurrent treatment; the frequency of treatment; and/or the need for therapy. For “therapeutic” use, the composition of the invention is administered to a subject diagnosed as having a pathological condition (e.g.: a proliferative disease such as cancer) with the goal of treating the disease, eventually in association with one or more conventional therapeutic modalities. In particular, a therapeutically effective amount could be that amount necessary to cause an observable improvement of the clinical status over the baseline status or over the expected status if not treated, as described hereinafter. An improvement of the clinical status can be easily assessed by any relevant clinical measurement typically used by physicians and skilled healthcare staff. For example, techniques routinely used in laboratories (e.g.: flow cytometry, histology, imaging techniques, etc.) may be used to perform tumor surveillance. A therapeutically effective amount could also be the amount necessary to cause the development of an effective non-specific (innate) and/or specific anti-tumor response. Typically, development of an immune response, in particular a T cell response, can be evaluated in vitro, in suitable animal models or using biological samples collected from the subject. One may also use various available antibodies so-as to identify different immune cell populations involved in anti-tumor response that are present in the treated subjects, such as cytotoxic T cells, activated cytotoxic T cells, natural killer cells and activated natural killer cells.

[0675] The appropriate dosage of the (wild-type, variant, recombinant or recombinant variant) chimeric poxvirus can be adapted as a function of various parameters and may be routinely determined by a practitioner in the light of the relevant circumstances. Suitably, individual doses for the (wild-type, variant, recombinant or recombinant variant) chimeric poxvirus may vary within a range extending from approximately 103 to approximately 10¹² vp (viral particles), iu (infectious unit) or PFU (plaque-forming units) depending on the virus and the quantitative technique used. For illustrative purposes, a suitable dose of (wild-type, variant, recombinant or recombinant variant) chimeric poxvirus or recombinant chimeric poxvirus for human use is comprised between approximately 10⁴ to approximately 10¹¹ PFU, preferably between approximately 10⁵ PFU to approximately 10¹⁰ PFU; doses of approximately 10⁶ PFU to approximately 5×10⁹ PFU being particularly preferred (e.g. dose of 10⁶, 2×10⁶, 3×10⁶, 4×10⁶, 5×10⁶, 6×10⁶, 7×10⁶, 8×10⁶, 9×10⁶, 10⁷, 2×10⁷, 3×10⁷, 4×10⁷, 5×10⁷, 6×10⁷, 7×10⁷, 8×10⁷, 9×10⁷, 10⁸, 2×10⁸, 3×10⁸, 4×10⁸, 5×10⁸, 6×10⁸, 7×10⁸, 8×10⁸, 9×10⁸, 109, 2×10⁹, 3×10⁹, 4×10⁹ or 5×10⁹ PFU). The quantity of virus present in a sample can be determined by routine titration techniques, e.g.: by counting the number of plaques following infection of permissive cells (e.g.: BHK-21 or CEF), immunostaining (e.g.: using anti-virus antibodies; Caroll et al., 1997, Virology 238:198-211), by measuring the A260 absorbance (vp titers), or still by quantitative immunofluorescence (iu titers).

[0676] The term “pharmaceutically acceptable vehicle” is intended to include any and all carriers, solvents, diluents, excipients, adjuvants, dispersion media, coatings, antibacterial and antifungal agents, absorption agents and the like compatible with administration in mammals and in particular human subjects.

[0677] The (wild-type, variant, recombinant or recombinant variant) chimeric poxvirus of the invention can independently be placed in a solvent or diluent appropriate for human or animal use. The solvent or diluent is preferably isotonic, hypotonic or weakly hypertonic and has a relatively low ionic strength. Representative examples include sterile water, physiological saline (e.g.: sodium chloride), Ringer's solution, glucose, trehalose or saccharose solutions, Hank's solution, and other aqueous physiologically balanced salt solutions (see for example the most current edition of Remington: The Science and Practice of Pharmacy, A. Gennaro, Lippincott, Williams&Wilkins).

[0678] In one embodiment, (wild-type, variant, recombinant or recombinant variant) chimeric poxviruses are suitably buffered for human use. Suitable buffers include without limitation phosphate buffer (e.g.: PBS), bicarbonate buffer and/or Tris buffer capable of maintaining a physiological or slightly basic pH (e.g. from approximately pH 7 to approximately pH 9).

[0679] The composition of the invention may also contain other pharmaceutically acceptable excipients for providing desirable pharmaceutical or pharmacodynamic properties, including for example osmolarity, viscosity, clarity, colour, sterility, stability, rate of dissolution of the formulation, modifying or maintaining release or absorption into a human or animal subject, promoting transport across the blood barrier or penetration in a particular organ.

[0680] In one embodiment, the composition of the invention can also comprise one or more adjuvants capable of stimulating immunity (especially a T cell-mediated immunity) or facilitating infection of tumor cells upon administration, e.g. through toll-like receptors (TLR) such as TLR-7, TLR-8 and TLR-9, including without limitation alum, mineral oil emulsion such as, Freunds complete and incomplete (IFA), lipopolysaccharide or a derivative thereof (Ribi et al., 1986, Plenum Publ. Corp., 407-419), saponins such as QS21 (Sumino et al., 1998, J.Virol. 72:4931; WO98/56415), imidazoquinoline compounds such as Imiquimod (Suader, 2000, J. Am Acad Dermatol. 43: S6), S-27609 (Smorlesi, 2005, Gene Ther. 12:1324) and related compounds such as those described in WO2007/147529, polysaccharides such as Adjuvax and squalenes, oil in water emulsions such as MF59, double-stranded RNA analogs such as poly (I: C), single stranded cytosine phosphate guanosine oligodeoxynucleotides (CpG) (Chu et al., 1997, J. Exp. Med., 186:1623; Tritel et al., 2003, J. Immunol., 171:2358) and cationic peptides such as IC-31 (Kritsch et al., 2005, J. Chromatogr. Anal. Technol. Biomed. Life Sci., 822:263-70).

[0681] In one embodiment, the composition of the invention may be formulated with the goal of improving its stability, in particular under the conditions of manufacture and long-term storage (i.e.: for at least 6 months, with a preference for at least two years) at freezing (e.g.:−70° C., −20° C.), refrigerated (e.g.: 4° C.) or ambient temperatures. Various virus formulations are available in the art either in frozen, liquid form or lyophilized form (e.g.: WO98/02522, WO01/66137, WO03/053463, WO2007/056847 and WO2008/114021, etc.). Solid (e.g.: dry powdered or lyophilized) compositions can be obtained by a process involving vacuum drying and freeze-drying (see e.g.: WO2014/053571). For illustrative purposes, buffered formulations including NaCl and/or sugar are particularly adapted to the preservation of viruses (e.g. S01 buffer: 342.3 g/L saccharose, 10 mM Tris, 1 mM MgCl2, 150 mM NaCl, 54 mg/L, Tween 80; ARME buffer: 20 mM Tris, 25 mM NaCl, 2.5% Glycerol (w/v), pH 8.0; S520 buffer: 100 g/L saccharose, 30 mM Tris, pH 7.6; S08 buffer: 10 mM Tris, 50 mM NaCl, 50 g/L saccharose, 10 mM Sodium glutamate, pH 8.0).

[0682] The composition is preferably formulated in a way adapted to the mode of administration to ensure proper distribution and release in vivo. For example, gastro-resistant capsules and granules are particularly appropriate for oral administration, suppositories for rectal or vaginal administration, eventually in combination with absorption enhancers useful to increase the pore size of the mucosal membranes. Such absorption enhancers are typically substances having structural similarities to the phospholipid domains of the mucosal membranes (such as sodium deoxycholate, sodium glycocholate, dimethyl-beta-cyclodextrin, lauryl-1-lysophosphatidylcholine). Another example relates to the use of cell carriers (e.g.: mesenchymal stem cells, neural stem cells) as a vehicle for virus delivery. Another and particularly appropriate example is a formulation adapted to the administration through microneedle means (e.g. transcutaneous or intradermal patches). Such a formulation may comprise resuspension of the immunotherapeutic product in endotoxin-free phosphate-buffered saline (PBS). It can also be formulated in liposomes. Biodegradable, biocompatible polymers can be used, such as ethylene vinyl acetate, polyanhydrides, polyglycolic acid, collagen, polyorthoester, and polylactic acid. Many methods for the preparation of such formulations are described by e.g.: J. R. Robinson in “Sustained and Controlled Release Drug Delivery Systems”, ed., Marcel Dekker, Inc., New York, 1978.

### Administration

[0683] The (wild-type, variant, recombinant or recombinant variant) chimeric poxvirus or the composition of the invention may be administered in a single dose or multiple doses. If multiples doses are contemplated, administrations may be performed by the same or different routes and may take place at the same site or at alternative sites. Intervals between each administration can vary from approximately 1 day to approximately 8 weeks (e.g.: 24 h, 48h, 72h, weekly, every two or three weeks, monthly, etc.), advantageously from approximately 2 days to approximately 6 weeks, preferably from approximately 3 days to approximately 4 weeks and even more preferably from approximately 1 week to approximately 3 weeks (e.g.: every two weeks for example). Intervals can also be irregular. It is also possible to proceed via sequential cycles of administrations that are repeated after a rest period (e.g.: cycles of 3 to 6 weekly administrations followed by a rest period of 3 to 6 weeks). The dose can vary for each administration within the range described above.

[0684] Any of the conventional administration routes are applicable in the context of the invention including parenteral, topical or mucosal routes. Parenteral routes are intended for administration as an injection or infusion and encompass systemic as well as local routes. Common parenteral injection types are intravenous (into a vein), intra-arterial (into an artery), intradermal (into the dermis), subcutaneous (under the skin), intramuscular (into a muscle) and intratumoral (into a tumor or at its proximity). Infusions typically are given by intravenous route. Topical administration can be performed using transdermal means (e.g.: patch and the like). Mucosal administrations include without limitation oral/alimentary, intranasal, intratracheal, intrapulmonary, intravaginal or intra-rectal route. In the case of intranasal, intrapulmonary and intratracheal routes, it is advantageous for administration to take place by means of an aerosol or by means of instillation. Preferred routes of administration for the chimeric vaccinia virus of the invention include intravenous and intratumoral routes.

[0685] Administrations may use conventional syringes and needles (e.g.: Quadrafuse injection needles) or any compound or device available in the art capable of facilitating or improving delivery of the active agent(s) in the subject. Transdermal systems are also appropriate, e.g.: using solid, hollow, coated or dissolvable microneedles (e.g.: Van der Maaden et al., 2012, J. Control release 161:645-55) and preferred are silicon and sucrose microneedle patches (see, e.g., Carrey et al., 2014, Sci Rep 4:6154 doi 10.1038; and Carrey et al., 2011, PloS ONE, 6 (7) e22442).

[0686] A particularly preferred composition comprises 10⁶ PFU to 5×10⁹ PFU of a (wild-type, variant, recombinant or recombinant variant) chimeric poxvirus according to the invention formulated for intravenous or intratumoral administration. Another preferred composition comprises 10⁶ PFU to 5×10⁹ PFU of a variant and/or recombinant variant chimeric poxvirus according to the invention defective in the J2R locus formulated for intravenous or intratumoral administration. Another particularly preferred composition comprises 10⁶ PFU to 5×10⁹ PFU of a variant and/or recombinant variant chimeric poxvirus according to the invention defective in the J2R locus and 14L and/or F4L locus formulated for intravenous or intratumoral administration. Another particularly preferred composition comprises 10⁶ PFU to 5×10⁹ PFU of a recombinant variant chimeric poxvirus according to the invention having the IL-12 inserted in place of the 14L locus and placed under the pH5R promoter such as chimeric poxvirus TK-/IL-12 described herein formulated for intravenous or intratumoral administration.

[0687] The (wild-type, variant, recombinant or recombinant variant) chimeric poxvirus of the invention can be associated with one or more substances effective in anticancer therapy. Among pharmaceutical substances effective in anticancer therapy which may be used in association or in combination with the chimeric poxvirus of the invention, there may be mentioned more specifically:
[0688] alkylating agents such as e.g.: mitomycin C, cyclophosphamide, busulfan, ifosfamide, melphalan, hexamethylmelamine, thiotepa, chlorambucil, or dacarbazine;
[0689] antimetabolites such as, e.g.: gemcitabine, capecitabine, 5-fluorouracil, cytarabine, 2-fluorodeoxy cytidine, methotrexate, idatrexate, tomudex or trimetrexate;
[0690] topoisomerase II inhibitors such as, e.g.: doxorubicin, epirubicin, etoposide, teniposide or mitoxantrone;
[0691] topoisomerase I inhibitors such as, e.g.: irinotecan (CPT-11), 7-ethyl-10-hydroxy-camptothecin (SN-38) or topotecan;
[0692] antimitotic drugs such as, e.g.: paclitaxel, docetaxel, vinblastine, vincristine or vinorelbine;
[0693] platinum derivatives such as, e.g.: cisplatin, oxaliplatin, spiroplatinum or carboplatinum;
[0694] inhibitors of tyrosine kinase receptors such as sunitinib (Pfizer) and sorafenib (Bayer); and
[0695] anti-neoplastic antibodies
[0696] cell carriers such as neural stem cells or mesenchymal stem cells sodium Iodide Symporter-Radioiodine Gene Therapy

[0697] The (wild-type, variant, recombinant or recombinant variant) chimeric poxvirus of the invention may also be used in association with one or more other agents including but not limited to immunomodulatory agents such as, e.g. alpha, beta or gamma interferon, interleukin (in particular IL-2, IL-6, IL-10 or IL-12) or tumor necrosis factor; CAR-T cells; agents that affect the regulation of cell surface receptors such as, e.g. inhibitors of Epidermal Growth Factor Receptor (in particular cetuximab, panitumumab, zalutumumab, nimotuzumab, matuzumab, gefitinib, erlotinib or lapatinib) or inhibitors of Human Epidermal Growth Factor Receptor-2 (in particular trastuzumab); agents that affect angiogenesis such as, e.g. inhibitor of Vascular Endothelial Growth Factor (in particular bevacizumab or ranibizumab); Immune Checkpoint Inhibitor (ICI), also designated as Immune Checkpoint Modulator (ICM), e.g. anti-PD1, anti-PD-L1, anti-PD-L2, anti-CTLA4, anti-Lag3, anti-BTLA and anti-Tim3.

[0698] Such substances effective in anticancer therapy may be administered to the subject sequentially or concomitantly with the (wild-type, variant, recombinant or recombinant variant) chimeric poxvirus of the invention.

[0699] In the case of a product combination, the present invention also provides kits including the active agent(s) of the combination of the invention in kit form. In one embodiment, a kit includes at least a (wild-type, variant, recombinant or recombinant variant) chimeric poxvirus as described herein in one container (e.g., in a sterile glass or plastic vial), and one or more pharmaceutical substances effective in anticancer therapy in another container (e.g., in a sterile glass or plastic vial). Optionally, the kit can include a device for performing the administration of the active agents. The kit can also include a package insert including information concerning the compositions or individual component and dosage forms in the kit.

[0700] Alternatively, or in combination, the (wild-type, variant, recombinant or recombinant variant) chimeric poxvirus of the invention can also be used in association with radiotherapy.

### Methods and Uses

[0701] In another aspect, the present invention provides a (wild-type, variant, recombinant or recombinant variant) chimeric poxvirus or a composition thereof (in particular a pharmaceutical composition) for use as a drug, for treating a disease or a pathologic condition in a subject in need thereof. The present invention also relates to the use of a (wild-type, variant, recombinant or recombinant variant) chimeric poxvirus or composition thereof for the manufacture of a medicament for treating a disease or a pathologic condition in a subject in need thereof. The present invention also relates to a method of treatment comprising administering the (wild-type, variant, recombinant or recombinant variant) chimeric poxvirus or the composition thereof in an amount sufficient for treating a disease or a pathologic condition in a subject in need thereof. The present invention also relates to the use of a (wild-type, variant, recombinant or recombinant variant) chimeric poxvirus or composition thereof for treating a disease or a pathologic condition in a subject in need thereof.

[0702] A “disease” (and any form of disease such as “disorder” or “pathological condition”) is typically characterized by identifiable symptoms.

[0703] Examples of diseases that may be treated using the (wild-type, variant, recombinant or recombinant variant) chimeric poxvirus of the invention, or the composition thereof include proliferative diseases such as cancers, tumors or restenosis.

[0704] The present invention is particularly suited for treating cancers, and particularly Adrenocortical Carcinoma, Adrenal Cortex Cancer, Anal Cancer, Gastrointestinal Carcinoid Tumors (for example

[0705] Appendix Cancer and Carcinoid Tumor), Bile Duct Cancer (for example Cholangiocarcinoma), Bladder Cancer, Bone Cancer (for example Ewing Sarcoma, Malignant Fibrous Histiocytoma of Bone and Osteosarcoma), Brain Tumors (for example Astrocytomas, Embryonal Tumors, Germ Cell Tumors, Central Nervous System Atypical Teratoid/Rhabdoid Tumor, Craniopharyngioma, Ependymoma, Gliomas and Glioblastoma), Breast Cancer (for example Ductal Carcinoma In Situ), Bronchial Tumors, Carcinoma of Unknown Primary, Cardiac (Heart) Tumors, Cervical Cancer, Chordoma, Chronic Myeloproliferative Neoplasms, Colorectal Cancer (for example Colon Cancer or Rectal Cancer), Esthesioneuroblastoma, Extracranial Germ Cell Tumor, Extragonadal Germ Cell Tumor, Retinoblastoma, Gallbladder Cancer, Gastrointestinal Carcinoid Tumor, Testicular Cancer, Gestational Trophoblastic Disease, Head and Neck Cancer (for example Hypopharyngeal Cancer, pharyngeal Cancer, Laryngeal Cancer, Lip and Oral Cavity Cancer, Metastatic Squamous Neck Cancer with Occult Primary, Mouth Cancer, Nasal Cavity and Paranasal Sinus Cancer, Nasopharyngeal Cancer, Salivary Gland Cancer, Throat Cancer, Esophageal Cancer), Hepatocellular (Liver) Cancer, Histiocytosis, Langerhans Cell, Kidney cancer (for example Wilms Tumor, Renal Cell Cancer, Transitional Cell Cancer of the Renal Pelvis and Ureter), Langerhans Cell Histiocytosis, Laryngeal Cancer and Papillomatosis, Leukemia (for example Hairy Cell Leukemia, Chronic Lymphocytic Leukemia (CLL), Chronic Myelogenous Leukemia (CML), Acute Myeloid Leukemia (AML), Acute Lymphoblastic Leukemia (ALL)), Liver Cancer, Lung Cancer (Small Cell Lung Cancer and Non-Small Cell Lung Cancer), Lymphoma (for example AIDS-Related Lymphoma, Primary CNS Lymphoma, Cutaneous T-Cell Lymphoma, Hodgkin Lymphoma, Burkitt Lymphoma, Primary Lymphoma, Mycosis Fungoides, Non-Hodgkin Lymphoma, Macroglobulinemia, Waldenstrom, Primary Central Nervous System (CNS) Lymphoma, Sezary Syndrome, T-Cell Lymphoma), Intraocular Melanoma, Mesothelioma, Midline Tract Carcinoma Involving NUT Gene, Multiple Endocrine Neoplasia Syndromes, Multiple Myeloma/Plasma Cell Neoplasms Myelodysplastic Syndromes, Chronic Myeloproliferative Neoplasms, Neuroblastoma, Ovarian Cancer (for example Primary Peritoneal Cancer and Fallopian Tube Cancer), Pancreatic Cancer and Pancreatic Neuroendocrine Tumors (Islet Cell Tumors), Papillomatosis, Paraganglioma, Parathyroid Cancer, Penile Cancer, Pheochromocytoma, Pituitary Tumor, Plasma Cell Neoplasm/Multiple Myeloma, Pleuropulmonary Blastoma, Prostate Cancer, Retinoblastoma, Vascular Tumors, Skin Cancer (for example Basal Cell Carcinoma, Melanoma, Squamous Cell Carcinoma and Merkel Cell Carcinoma), Small Intestine Cancer, Soft Tissue Sarcoma (for example Gastrointestinal Stromal Tumors (GIST), AIDS-Related Cancers Kaposi Sarcoma, Kaposi Sarcoma and Rhabdomyosarcoma), Stomach (Gastric) Cancer, Testicular Cancer, Thymoma and Thymic Carcinoma, Thyroid Cancer, Urethral Cancer, Uterine Cancer, Endometrial and Uterine Sarcoma, Vaginal Cancer and Vulvar Cancer. The present invention is also useful for treatment of metastatic cancers. In a preferred embodiment, the present invention is particularly suited for treating solid cancers (including for example carcinomas and sarcomas) or hematological malignancies (including for example lymphoma, leukemia and myelomas). In a preferred embodiment, the present invention is particularly suited for treating lung cancer, renal cancer, bladder cancer, prostate cancer, breast cancer, colorectal cancer, colon cancer, hepatic cancer, hepatocarcinoma, gastric cancer, pancreatic cancer, melanoma, ovarian cancer and glioblastoma. In a more preferred embodiment, the present invention is particularly suited for treating lung cancer, colon cancer, hepatocarcinoma, pancreatic cancer, melanoma and glioblastoma. In another preferred embodiment, the present invention is particularly suited for treating cancers refractory or resistant to at least one oncolytic virus-based therapy, or to at least one oncolytic vaccinia virus-based therapy.

[0706] A particularly preferred method comprises 1 to 6 (e.g.: 3) intravenous or intratumoral administrations of the (wild-type, variant, recombinant or recombinant variant) chimeric poxvirus of the invention or the composition thereof given at weekly to monthly intervals with a specific preference for 3 bi-weekly administrations (e.g.: at approximately D1, D14 and D29) of a composition comprising 10⁶ to 5×10⁹ PFU of a (wild-type, variant, recombinant or recombinant variant) chimeric poxvirus, the latter being preferably defective in J2R locus and/or in the 14L or F4L locus.

[0707] Another particularly preferred method comprises 1 to 6 (e.g.: 3) intravenous or intratumoral administrations of the (wild-type, variant, recombinant or recombinant variant) chimeric poxvirus of the invention or the composition thereof given at weekly to monthly intervals with a specific preference for 3 bi-weekly administrations (e.g.: at approximately D1, D14 and D29) of a composition comprising 106 to 5×10⁹ PFU of a (wild-type, variant, recombinant or recombinant variant) chimeric poxvirus, the latter being preferably defective in J2R locus and/or in the 14L or F4L locus, and encoding an interleukin, more preferably encoding an IL-12.

[0708] The beneficial effects provided by the methods of the present invention can be evidenced by an observable improvement of the clinical status over the baseline status or over the expected status if not treated according to the modalities described herein. An improvement of the clinical status can be easily assessed by any relevant clinical measurement typically used by physicians and skilled healthcare staff. In the context of the invention, the therapeutic benefit can be transient (for one or a couple of months after cessation of administration) or sustained (for several months or years). As the natural course of clinical status which may vary considerably from a subject to another, it is not required that the therapeutic benefit be observed in each subject treated but in a significant number of subjects (e.g. statistically significant differences between two groups can be determined by any statistical test known in the art, such as a Tukey parametric test, the Kruskal-Wallis test the U test according to Mann and Whitney, the Student's t-test, the Wilcoxon test, etc.).

[0709] In a particular embodiment, as the methods according to the present invention are particularly appropriate for treating cancer, such methods can be correlated with one or more of the followings: inhibiting or slowing tumor growth, proliferation and metastasis, preventing or delaying tumor invasion (spread of tumor cells in neighboring tissues), reducing the tumor number; reducing the tumor size, reducing the number or extent of metastases, providing a prolonged overall survival rate (OS), increasing progression free survival (PFS), increasing the length of remission, stabilizing (i.e. not worsening) the state of disease, providing a better response to the standard treatment, improving quality of life and/or inducing an anti-tumor response (e.g. non-specific (innate) and/or specific such as a cytotoxic T cell response) in the subject treated in accordance with the present invention.

[0710] The appropriate measurements that can be used to assess a clinical benefit such as blood tests, analysis of biological fluids and biopsies as well as medical imaging techniques are evaluated routinely in medical laboratories and hospitals and a large number of kits is available commercially. They can be performed before the administration (baseline) and at various time points during treatment and after cessation of the treatment.

[0711] The present invention also relates to a method for treating a disease or a pathological condition in a subject in need thereof comprising administering the (wild-type, variant, recombinant or recombinant variant) chimeric poxvirus or the composition of the present invention or prepared according to the process described herein. In one embodiment, said disease is a proliferative disease such as cancers, tumors and restenosis. More precisely, the present invention relates to a method for inhibiting tumor cell growth in vivo comprising administering a (wild-type, variant, recombinant or recombinant variant) chimeric poxvirus or a composition thereof in a subject in need thereof so-as to inhibit the growth of a tumor. For general guidance, inhibition of tumor cell growth can be evaluated routinely, for example by radiography means. The administration(s) of the (wild-type, variant, recombinant or recombinant variant) chimeric poxvirus or the composition thereof desirably result(s) in at least a 10% decrease of the tumor mass.

[0712] All of the above cited disclosures of patents, publications and database entries are specifically incorporated herein by reference in their entirety. Other features, objects, and advantages of the invention will be apparent from the description, drawings and from the claims. The following examples are incorporated to demonstrate preferred embodiments of the invention. However, in light of the present disclosure, those skilled in the art should appreciate that changes can be made in the specific embodiments that are disclosed without departing from the spirit and scope of the invention.

### Examples

### Generation and Characterization of Poxstg19503, a Chimeric Poxvirus, and Two Variants Thereof (Single Deleted in J2R and Double Deleted in J2R and 14L)

[0713] For the sake of making the reading process easier, Table 1 is provided, comprising the description of the code references used in the Figures and Examples.

TABLE 1
Codes of the viruses (optionally variant and/or recombinant)
cited in the Description section and the Examples section.

| Code | Description |
|---|---|
| VVTG17111 | TK-deleted vaccinia virus strain |
| | Copenhagen encoding GFP::FCU1 |
| VVTG19328 | Double (TK/RR)-deleted vaccinia virus strain |
| | Copenhagen encoding mIL-12 |
| TG6002 | Double (TK/RR)-deleted vaccinia virus strain |
| | Copenhagen encoding FCU1 |
| VVTG17990 | Double (TK/RR)-deleted vaccinia virus strain |
| | Copenhagen encoding GFP |
| WRTG15467 | TK-deleted vaccinia virus strain Western |
| | Reserve encoding GFP |
| WYTG18254 | TK-deleted vaccinia virus strain Wyeth |
| | encoding hGM-CSF |
| CPXTG18831 | TK-deleted cowpox virus strain Brighton |
| | encoding GFP::FCU1 |
| RPXTG19095 | TK-deleted rabbitpox virus strain Utrecht |
| | encoding GFP |
| MVATG15938 | Vaccinia virus strain MVA encoding GFP |
| POXSTG19503 | Wild-type chimeric poxvirus |
| POXSTG19508 | TK-deleted chimeric poxvirus encoding |
| | GFP::FCU1 |
| POXSTG19730 | Double (TK/RR)-deleted chimeric poxvirus |
| | encoding GFP::FCU1 and mCherry |
| POXSTG19847 | Double (TK/RR)-deleted chimeric poxvirus |
| | encoding mIL-12 |
| POXSTG20150 | Double (TK/RR)-deleted chimeric poxvirus |

### Materials and Methods

### Cell Lines and Viruses

[0714] Human colon cancer cell line HCT116 (CCL-247™), human lung cancer cell line A549 (CCL-185™), human hepatocarcinoma cell line HepG2 (HB 8065™), human glioblastoma cancer cell line U-87 MG (HTB-14™), human pancreatic cancer cell line MIA PaCa-2 (CRL-1420™), murine melanoma cell line B16F10 (CRL-6475), murine colon carcinoma cell line CT26 (CRL-2638) and Vero cell line (CCL-81) were obtained from the American Type Culture Collection (ATCC, Rockville, MD). All cell lines were grown in recommended media supplemented with 10% fetal calf serum (FCS). Fresh human hepatocytes were purchased from Biopredic International (Rennes, France) and maintained in the recommended hepatocyte medium provided by the supplier (Biopredic International). The Phenion full-thickness skin model, a 3D tissue construct that simulates histological and physiological properties of human skin, was purchased from Henkel (Düsseldorf, Germany). This organotypic epithelial raft culture model was maintained in tissue culture medium according to the manufacturer's instructions. Primary chicken embryo fibroblasts (CEF) were used for recombination, production and titration of viral vectors. CEF cells were prepared as previously described (Foloppe et al., 2008, Gene Ther., 15, 1361-1371. doi: 10.1038/gt.2008.82) and maintained in Eagle-based Medium (MBE) supplemented with 5% FCS. Wild-type vaccinia virus Western Reserve strain (WR, ATCC VR-119), wild-type vaccinia virus Wyeth strain (WY, ATCC VR-1536™), wild-type Cowpox virus strain Brighton (CPXV, ATCC VR-302), wild-type Raccoonpox virus strain Herman (RCNV, ATCC VR-838), wild-type Rabbitpox virus strain Utrecht (RPXV, ATCC VR-1591), wild-type Bovine Papular Stomatitis virus strain Illinois 721 (BPSV, ATCC VR-801), wild-type ORF virus strain NZ2 (ORFV, ATCC VR-1548), wild-type Pseudo-cowpox virus strain TJS (PCPV, ATCC VR-634), wild-type Myxoma virus strain Lausanne (MYXV, ATCC VR-1829), wild-type Yaba-like disease virus strain Davis (YLDV, ATCC VR-937), wild-type Swinepox virus strain Kasza (SWPV, ATCC VR-363), wild-type Cotia virus strain SP AN 32 (CTV, ATCC VR-464) wild-type Squirrel Fibroma virus strain Kilham (SQFV, ATCC VR-236) and wild-type IHD-J (ATCC VR-156) were obtained from ATCC. Wild-type vaccinia virus strain Copenhagen (COP) used in the work described here comes from the Institut Merieux (Marcy l′Etoile, France). MVA expressing the eGFP gene under the control of the p11k7.5 promoter (MVATG15938) was constructed and characterized previously (Erbs et al., 2008, Cancer Gene Ther., 15, 18-28). Wild-type Fowlpox virus strain FP9 (FPV) was kindly provided by Pr Skinner. Double (TK/RR)-deleted Copenhagen strain VACVs encoding FCU1 (TG6002) or GFP (VVTG17990) were constructed and characterized previously (Foloppe et al., 2019, Mol Ther Oncolytics, 14, 1-14; Beguin et al., 2020, Mol Ther Oncolytics, 19, 57-66).

### Patient-Derived Serum Fluid

[0715] Serum was obtained from patients enrolled in phase 1 clinical trial evaluating the safety and tolerability of multiple-ascending doses of the Copenhagen strain VACV TG6002 administered intravenously in patients with advanced gastro-intestinal tumors (NCT03724071). All patients gave written informed consent according to good clinical practice guidelines. Serum samples from a patient collected one day before IV administration of TG6002 and 42 days after virus administration were used for VACV neutralization assay.

### Neutralizing Antibody Assay

[0716] A neutralizing antibody assay was used to determine the titer of VACV neutralizing antibodies (VACV-NAbs) in serum. For the serum collected before TG6002 administration, the VACV-NAb titer was below the limit of detection (<20), while this titer was 4580 for the serum collected 42 days post-infection. Two-fold serial dilutions of serum samples were incubated with the GFP expressing vaccinia virus VVTG17990 in 6-well plates for 1 hour at 37° C. The diluted serum-virus mixtures were then added to Vero Cells for VVTG17990 titration by plaque assay. After three days of incubation, Vero cell culture plates were examined using a fluorescence microscope to score the virus-infected cells (plaque). The neutralizing antibody titer was defined as the highest serum dilution preventing ≥50% plaque formation.

### Directed Evolution for Selection of Chimeric Poxvirus

[0717] Sixteen poxviruses (COP, WY, WR, MVATG15938, CPXV, RCNV, RPXV, BPSV, ORFV, PCPV, MYXV, YLDV, SWPV, CTV, SQFV, FPV) were mixed and used to infect the permissive human A549 cells (1.5×10⁶ cells/well in a 6 well-plate) and constituted the initial virus mix. The mix used for the first passage consisted of 1.5×10⁴ PFU of each virus corresponding to a Multiplicity of Infection (MOI) of 10⁻² for each virus. One day post infection, cells and supernatant from the first initial virus mix were harvested and then used entirely to infect a confluent T-75 tissue culture flask (T75) of A549 cells (passage 1). Cells and supernatant were harvested 72 h post infection and 1 mL of this mix was used to infect a confluent T75 flask of A549 cells (passage 2). Seventy-two hours post infection, one mL of cells and supernatant from the second passage was used to infect a T75 flask of A549 cells. Supernatant from the third passage was then used in a 10-fold dilution series to infect a T75 flask of A549 cells. Amplification and selection of viral progeny was done by 6 additional passages (passage 3 to passage 9) on A549 cells by supernatant dilution. The infected T75 were observed for the first signs of cytopathic effect (CPE).

[0718] From passage 3 to passage 9, to harvest the most potent viruses, cell culture supernatant was harvested 24h post infection from the flask infected with the most concentrated inoculum in the 10-fold dilution series that did not show any sign of potent CPE. The use of the permissive A549 cell line allows a high rate of recombination between the virus resulting in the generation of more clone types, and a higher variability. From passage 9, 48 individual plaque-purified viruses were isolated, amplified, and titrated on A549 cells. Oncolytic activities of these clones were then evaluated on A549 tumor cell line.

### Generation of Variant Chimeric Poxviruses

[0719] Double (TK/RR)-deleted virus, named POXSTG20150, was generated after deletion of two short sequences within the genes encoding respectively for the RR and the TK proteins. POXSTG20150 genome nucleotide sequence was inferred by deleting in silico these two segments from POXSTG19503 genomic sequence.

### Generation of Recombinant Chimeric Poxviruses

[0720] Single (TK)-deleted virus, named POXSTG19508, was generated by insertion of the GFP::FCU1 fusion gene into the POXSTG19503 J2R locus. Briefly, CEF were infected with POXSTG19503 at a MOI of 10 2 and incubated at 37° C. for 2 h, then transfected with a shuttle plasmid containing the GFP::FCU1 fusion gene (Ricordel et al., 2017, Mol Ther Oncolytics, 7, 1-11) under the control of the synthetic p11k7.5 promoter and surrounded by the flanking sequence of the vaccinia virus J2R gene. The cells were then incubated for 48 h at 37° C. Double recombination occurred between J2R homologous regions in the shuttle plasmid and the parental virus, resulting in the insertion of the GFP::FCU1 fusion gene into the J2R locus of POXSTG19503. Recombinant virus, named POXSTG19508, was isolated and submitted to additional plaque purification cycles on CEF. Insertion of the GFP::FCU1 sequence into the J2R locus was confirmed by multiple PCRs and DNA sequencing. The same methods were used to generate the double (TK/RR)-deleted virus, named POXSTG19730, by homologous recombination between POXSTG19508 and a shuttle plasmid containing the mCherry gene under the control of the pH5R promoter and surrounded by the flanking sequence of the vaccinia virus 14L gene. Insertion of the mCherry sequence into the 14L locus was confirmed by multiple PCRs and DNA sequencing. For generation of the double (TK/RR)-deleted virus expressing murine IL-12 (mIL-12) and renamed POXSTG19847, mCherry was replaced by mIL-12 by homologous recombination between POXSTG19730 and a shuttle plasmid containing the mIL-12 gene under the control of the pH5R promoter. Insertion of the mIL-12 sequence into the 14L locus was confirmed by multiple PCRs and DNA sequencing. Single (TK)-deleted Vaccinia virus strain Copenhagen, named VVTG17111, was generated by insertion of the GFP::FCU1 fusion gene into the J2R locus. Recombinant chimeric poxviruses were amplified in CEF and purified, and virus stocks were titrated on CEFs by plaque assay.

### In Vitro Cytotoxicity Assay

[0721] The viral lytic capacity was measured using the trypan blue exclusion method. Human tumor cells were transduced in suspension by respective chimeric viruses at the indicated MOI. A total of 3×10⁵ cells/well were plated in 6-well culture dishes in 2 ml of medium supplemented with 10% FCS. Cells were then cultured at 37° C. for 4 or 5 days and the viable cells were counted by trypan blue exclusion using a Vi-Cell Cell Counter (Beckmann Coulter, CA). All samples were analysed in triplicate. Mock-infected cells served as negative control and established the 100% survival point for the given assay.

### In Vitro Virus Yield

[0722] To evaluate viral replication in human tumor cells and human primary cells, HepG2 cells and hepatocytes were infected in 6-well plates at MOI 10⁻⁵ and MOI 10⁴, respectively (in triplicate). Three days after infection, supernatants and cells were collected, freeze thawed, sonicated, and viral progeny was quantified on Vero cells by plaque assay.

[0723] To evaluate viral replication in a reconstructed human skin model, culture of Phenion full-thickness skin model was infected with the indicated virus at 10⁵ PFU (in triplicate). Cultures were incubated for 7 days at 37° C. Viral progeny in reconstructed skin were quantified on CEFs by plaque assay after 2 cycles of sonication in PBS.

[0724] To quantify the infectious EEV and IMV at early times after infection, confluent A549 cells (1×10⁶ cells) were infected in 6-well plates at MOI 10⁻¹ for 1 h (in triplicate). Cells were then washed with PBS and replaced with fresh medium and incubated for 16 or 24 hours. Supernatants and cell fractions were collected separately. The supernatants were used to quantify EEV. The cell fractions were harvested in 1 mL PBS and the cell-associated virions, namely IMV, were extracted from cell lysates by freeze-thawing and sonication. Both virions (EEV and IMV) were titrated on CEFs by plaque assay.

### Cytosine Deaminase Enzymatic Assay

[0725] Cytosine deaminase (CDase) activity was quantified by measuring the amount of 5-FU released in the culture media. A549 cells were infected with the different vectors at a MOI of 10⁻⁴ (in triplicate) and plated in 6-well culture dish (3×10⁵ cells/well). After 6 hours, 1 mM 5-FC was added to the culture medium. From day 1 to day 3 post infection, 5-FC and 5-FU concentrations in the media were measured by HPLC. Fifty μl of media were quenched with 50 μL of acetonitrile. The samples were vortexed and centrifuged. The organic supernatant was evaporated to dryness and reconstituted in 50 μL of water and analysed by HPLC using a mobile phase of 50 mM phosphoric acid adjusted to pH 2.1. Results are expressed as the percentage of 5-FU relative to the total amount of 5FC+5FU after various incubation times with 5-FC.

### Comet Assays

[0726] A549 cells were seeded in 60 mm tissue culture dishes and grown to confluence overnight. The next day, cell monolayers were rinsed with PBS, inoculated with approximately 40 plaque-forming units (PFU) of viruses in 500 μL of PBS supplemented with 2% FCS, 1% cations, and incubated for one hour at 37° C. After one hour, monolayers were rinsed and overlaid with 5 ml of growth media. Two days after infection, plaques were imaged using a Nikon SMZ18 fluorescence microscope (GFP) and monolayers were stained with crystal violet (stock solution diluted 1:40 in ethanol) for visualisation.

### Neutralization Assay

[0727] Viruses' oncolytic activity was performed in the presence of serum collected from patient before and after IV injection of TG6002. HCT116 tumor cells seeded in 96-well plate (1×10⁴ cells/well) were infected with the indicated viruses at various MOIs in triplicate. Virus inoculums were incubated with serum (diluted 100-folds in PBS) for 1 h at 37° C. before being added to the cells. At 96 h post-infection, the viability of tumor cells was determined using the CellTiter-Blue Cell Viability Assay (Promega) following the manufacturer's instruction. Optical density was read at a microplate reader (Tecan Infinite M1000 Pro) with 560 nm excitation and 590 nm emission. The viability of the infected tumor cells was calculated as a percentage relative to the mock-infected cells. The EC50 was determined by fitting a sigmoidal dose-response curve using the GraphPad Prism software.

### Animal Studies

[0728] For human xenograft tumor models, 5×10⁶ human cancer cells (HCT116 and HepG2) were injected subcutaneously into the flank of Swiss nude mice. When the tumors reached a diameter of 100-200 mm³, the mice were randomized in a blinded manner and treated once intravenously with the indicated vectors.

[0729] For bilateral tumor model, 5×10⁶ human cancer HCT116 cells were injected on both sides of the flank of Swiss nude. When the tumors reached a diameter of 100-200 mm³, the mice were randomized in a blinded manner and the virus was injected once intratumorally in the right-side tumor.

[0730] For syngeneic murine tumor models, 2×10⁵ CT26 cells or 3×10⁵ B16F10 cells were injected subcutaneously into the flank of BALB/c mice (CT26) or C57BL/6 mice (B16F10). When tumors became palpable, the mice were randomized in a blinded manner and treated intratumorally with the indicated vectors.

[0731] Tumor size was measured twice weekly using calipers. Tumor volumes were calculated in cubic millimeters using the formula π/6×length×width². The animals were euthanized when their tumor volumes reached 2000 mm³. For bilateral tumor model, mice were euthanized when total volume of both tumors exceeded 2000 mm³.

[0732] To assess the amount of virus in tumors, tumors were collected and weighed, homogenized in PBS, sonicated, and titers were determined on Vero cells by plaque assay.

### Immunohistochemical Analysis

[0733] Tumors were collected, formalin fixed, paraffin-embedded and sectioned. Sections (5 μM) were mounted on adhesive glass slides and used for histological analysis. Virus-infected cells were detected upon incubation of the slide with rabbit IgG anti-vaccinia virus (B65101R, Meridian) at a dilution of 1:1400 and the antibody-binding signal was detected by using the NovoLink Polymer Detection System (Leica Microsystems). Signals were visualized with the TSA-fluorescein pack (SAT701001EA, Akoya) and counterstained with DAPI (B-2883, Sigma). Stained slides were scanned by a high-resolution fluorescent slide scanner (Nanozoomer, Hamamatsu) and quantification of the signal was done using the Calopix software (Tribvn). Virus-infected cells were expressed as a proportion of total tumor area.

### Syncytia Formation Assay

[0734] Vaccinia virus strain Copenhagen and chimeric poxvirus were tested in the HCT116 human CRC cancer cell line. HCT116 cells were infected with the VVTG17111 and POXSTG19508 at a MOI of 10⁻² or 10⁻³ and plated in 6-well culture dish (3×10⁵ cells/well). Cells were observed by optical and fluorescence microscopy at 40 and 60h post infection.

### Neutralization Assay by Complement-Mediated Virus

[0735] Vaccinia virus strain Copenhagen and chimeric poxvirus were incubated for 1 hour at 37° C. at a dose of 2×10⁷ PFU in 200 μL of commercially available normal human serum (Sigma-Aldrich, Darmstadt, Germany). The infectious virus remaining was quantified by plaque assay on Vero cells. As a control for complement activation, viruses were incubated under the same conditions with heat-treated human serum at 56° C. for 1 hour and quantified as described above.

### Specific T-Cell Response Measured by IFNγ ELISpot

[0736] Interferon-γ (IFN-γ) secretion by splenocytes T cell from mice treated with viruses was assessed by ELISpot assays to evaluate the activation of the cytotoxic T lymphocytes CTLs against both tumoral and viral validated epitopes. Murine colon carcinoma CT26 cells (2×10⁵ cells) were injected subcutaneously into the flank of BALB/c mice. When tumors became palpable, the mice were randomized in a blinder manner and treated intratumorally with a single injection of VVTG17111 or POXSTG19508 at 1×10⁷ PFU. Six days post-injection, mice were euthanized, and their spleens were collected. Mononuclear cells were obtained from splenocytes by density gradient centrifugation on Lymphocyte-M (Cedarlane) and after red blood cell lysis (BD Pharm Lyse Lysing Buffer 1×). 350,000 cells/well were plated in 96-well MSIP plates (Millipore) coated with anti-IFNγ capture mAB (Mabtech) and stimulated with 1 ug/mL of an irrelevant peptide (TPHPARIGL) or with 1 μg/ml of the vaccinia-specific S9L8 peptide (SPGAAGYDL) or with 1 μg/mL of the tumor-associated antigen AH1 peptide (SPSYVYHQF). Plates were incubated for 18 hours, washed and immunospots were revealed using biotinylated anti-IFNγ detection mAB (Mabtech AB, Extravidin-Phosphatase alkaline (Sigma) and BCIP/NBT solution (Sigma). Spots were counted using an ELISpot reader (CTL Immunospot reader, S5UV).

### DNA Sequencing

[0737] Samples from viral DNA were purified with AMPure XP (Beckman Coulter, Inc.) beads kit to remove residual cellular DNA and sent for sequencing to the GenomEast platform (IGBMC Microarray and Sequencing platform, Illkirch-Graffenstaden, France). Data from Illumina HiSeq4000 in 2×100 bp paired-end runs were quality trimmed using custom scripts written in Perl and R. Pairs with at least one read having more than 5 bases with a Phred quality score <13 were discarded at this step. The filtered reads were then mapped (using bwa, doi: 10.1093/bioinformatics/btp324) against the genome of the host cells used for virus production, and the pairs properly mapped with a high mapping score were considered as contaminant and discarded. This step was particularly important for samples with high proportion of contaminating DNA from host cell genomes. Contigs were de novo assembled with SPAdes v3.11.1 (Nurk et al., 2013, J Comput Biol., 20, 714-737. doi: 10.1089/cmb.2013.0084) following authors instructions and scaffolding was performed with custom script to generate the longest consensus sequence for each viral genome. Open reading frames (ORFs) longer than 150 nt were automatically annotated, and a custom script written in python3 and based on the Dijkstra algorithm was used to identify homologous regions between POXSTG19503 and each of the parental strains. Global pairwise alignments were performed using MAFFT v7.017 to measure the genomic homology between POXSTG19503 and each parental genome, and to highlight the longest regions with strict identity between POXSTG19503 and the corresponding parental genome (Katoh et al., 2002, Nucleic Acids Res. 30, 3059-3066). In addition, multiple alignments of the whole core-region of POXSTG19503 and the parental genomes was performed using Mauve (doi: 10.1101/gr.2289704) to identify potential structural variants.

### Results

POXSTG 19503 is a Chimeric Poxvirus with Enhanced Oncolytic Potency In Vitro

[0738] A direct evolution strategy was employed to generate chimeric poxvirus with increased oncolytic potency and tumor selectivity. A library of viruses was first generated by co-infecting A549 cells with 16 poxviral strains including VVs, CPXV, RCNV, RPXV, BPSV, ORFV, PCPV, MYXV, YLDV, SWPV, CTV, SQFV and FPV. Then, amplification of viral progeny under stringent conditions was performed by nine consecutive passages on A549 cells. The use of the permissive A549 cell line allows a high rate of recombination between the virus resulting in the generation of more clone types, and a higher variability. Moreover, in order to select chimeric viruses with high oncolytic potential, several passages were carried out using high dilutions (1/10 000) as well as short post-infection collection times (24h). Forty-eight individual plaque-purified viruses were isolated from passage 9 and screened for their oncolytic potential on a panel of tumor cells. With one of the clones, designated POXSTG19503, we have obtained a superior oncolytic activity on the 6 tested tumor cell lines (A549, MIA PaCa-2, U-87 MG, B16F10 and HepG2) compared to COP(FIG. 1) which had shown the highest oncolytic activity of the parental strains (Ricordel et al., 2018, Cancers (Basel), 10, doi: 10.3390/cancers10070231; Ricordel et al., 2018, Oncotarget 9, 35891-35906). The clone purity was assessed by evaluation of 10 plaque-purified clones originated from POXSTG19503, all of which displayed the same phenotype and oncolytic activity in different tumor cells (data not shown).

### Genome Analysis

[0739] DNA from POXSTG19503 and from the 16 parental virus species or strains were purified and sequenced by Next Generation Sequencing. The use of paired-end short reads and whole genome de novo assembly led to the generation of viral genomes with the core region and one copy of the Inverted Terminal Repeats (ITR) domain. These single-ITR versions of the genomes are due to the use of unique k-mers in the contigs assembly process, but the presence of both ITR regions in every viral genome was confirmed by the mean depth of coverage which was higher than the one from the core region, with a 2-fold factor (data not shown). Single-ITR versions of the genomes were retained for the sake of clarity in the subsequent paragraph. Length of resulting genomes sequences for the parental viruses and POXSTG19503 (185′577 nt) are reported in Table 2.

TABLE 2
Size of the de novo assembled genomes and ITR. Virus short name
and full names are indicated in the two first columns. Size of the
mono-ITR genome and the assembled ITR only are reported in the
3^{rd} and 4^{th} column, respectively.

| | | Size of final | Size of |
|---|---|---|---|
| | | assembled | assembled |
| Virus ID | Virus name | genome | ITR |
| COP | Vaccinia virus | 175′860 | 8′158 |
| WR | Vaccinia virus | 181′419 | 6′938 |
| Wyeth (WY) | Vaccinia virus | 182′664 | 16′306 |
| MVATG15938 | Vaccinia virus | 163′444 | 3′988 |
| CPX | Cowpox virus | 212′521 | 6′507 |
| RCN | Raccoonpox virus | 201′260 | 1′737 |
| RPX | Rabbitpox virus | 186′491 | 3′462 |
| ORF | Orf virus | 133′176 | 2′032 |
| PCP | Pseudocowpox | 128′008 | 12′426 |
| BPS | Bovine Papular | 133′871 | 863 |
| | stomatitis virus | | |
| MYX | Myxoma virus | 150′327 | 11′604 |
| SqPV (SF) | Squirrelpox virus | 147′605 | No ITR |
| FPV (FP) | Fowlpox virus | 248′557 | 6′500 |
| SPV (SWP) | Swinepox virus | 122′765 | 3′597 |
| YLD | Yaba-like | 142′724 | 1′915 |
| | disease virus | | |
| CTV (COT) | Cotia virus | 158′746 | 939 |
| POXSTG19503 | Chimeric poxvirus | 185′577 | 9′667 |
| POXSTG19508 | Chimeric poxvirus | 187′589 | 9′667 |
| | TK- encoding | | |
| | GFP::FCU1 | | |
| POXSTG19730 | Chimeric poxvirus | 188′046 | 9′667 |
| | TK- RR- encoding | | |
| | GFP::FCU1 | | |
| | and mCherry | | |
| POXSTG20150 | Chimeric poxvirus | 184′661 | 9′667 |
| | TK- RR- | | |

Sequence comparison between de novo genome assemblies showed that almost each segment of POXSTG19503 genome was 100% identical to at least one segment from one parental virus. However, sequences from only 6 parental viruses, namely Rabbitpox virus, Cowpox virus, and the Vaccinia virus strains Wyeth, Western-Reserve, Copenhagen and the Modified Vaccinia Virus Ankara, were found 100% identical in POXSTG19503. These 6 viruses belonged all to the Poxvirus genus, indicating that homologous recombination occurred preferentially between the closely related members of this genus. Segments of POXSTG19503 genome longer than 500 nucleotides and 100% identical of a parental genome are indicated on FIG. 2A and reported in Table 3. Of note, the longest segment identified was 100% identical to the cowpox virus genome on 37′000 nucleotides (position 14,242 to 51,241).

TABLE 3
Genomic coordinates and length of POXSTG19503 segments that
are 100% identical to a parental genome. Name of the parental
genome is indicated in the first column, coordinates in the 2^{nd} and
3^{rd} columns and length of the segments are reported in the
last column. The ″start position″ and ″stop position″
correspond to nucleotide positions. The nucleotide in position
1 is defined as the first nucleotide of the core genome.

| Parental virus | Start pos | Stop pos | Length (nt) |
|---|---|---|---|
| CPX | 14,242 | 51,241 | 37,000 |
| MVA | 95,530 | 116,249 | 20,720 |
| RPX | 137,520 | 154,979 | 17,460 |
| CPX | 59,852 | 72,141 | 12,290 |
| MVA | 118,460 | 127,289 | 8,830 |
| RPX | 54,042 | 59,851 | 5,810 |
| RPX | 83,610 | 88,879 | 5,270 |
| RPX | 154,990 | 160,079 | 5,090 |
| RPX | 562 | 4,701 | 4,140 |
| Wyeth | 176,100 | 179,909 | 3,810 |
| RPX | 127,290 | 130,589 | 3,300 |
| MVA | 134,800 | 137,519 | 2,720 |
| Wyeth | 81,060 | 83,529 | 2,470 |
| WR | 169,190 | 171,579 | 2,390 |
| MVA | 91,460 | 93,839 | 2,380 |
| WR | 173,730 | 176,099 | 2,370 |
| Wyeth | 162,290 | 164,599 | 2,310 |
| Wyeth | 116,250 | 118,459 | 2,210 |
| Wyeth | 181,920 | 184,099 | 2,180 |
| MVA | 88,880 | 90,899 | 2,020 |
| Wyeth | 76,630 | 78,639 | 2,010 |
| RPX | 131,230 | 133,199 | 1,970 |
| Wyeth | <74103 | 75,719 | >1617 |
| RPX | 133,200 | 134,799 | 1,600 |
| Wyeth | 165,670 | 167,259 | 1,590 |
| Wyeth | 52,472 | 54,041 | 1,570 |
| Wyeth | 78,640 | 80,079 | 1,440 |
| Wyeth | 180,020 | 181,289 | 1,270 |
| Wyeth | 72,772 | 74,021 | 1,250 |
| Wyeth | 160,080 | 161,239 | 1,160 |
| Wyeth | 10,112 | 11,261 | 1,150 |
| WR | 172,550 | 173,659 | 1,110 |
| Wyeth | 164,600 | 165,669 | 1,070 |
| Wyeth | 6,522 | 7,581 | 1,060 |
| WR | 80,080 | 81,059 | 980 |
| Wyeth | 168,210 | 169,189 | 980 |
| WR | 167,260 | 168,209 | 950 |
| WR | 171,590 | 172,539 | 950 |
| COP | 7,612 | 8,521 | 910 |
| CPX | 75,720 | 76,629 | 910 |
| MVA | 184,160 | 185,029 | 870 |
| MVA | 94,670 | 95,519 | 850 |
| Wyeth | 93,840 | 94,669 | 830 |
| Wyeth | 5,702 | 6,511 | 810 |
| Wyeth | 8,652 | 9,451 | 800 |
| Wyeth | 51,742 | 52,471 | 730 |
| WR | 11,812 | 12,451 | 640 |
| Wyeth | 5,112 | 5,691 | 580 |
| Wyeth | 161,340 | 161,919 | 580 |
| RPX | 181,290 | 181,859 | 570 |
| Wyeth | 90,910 | 91,459 | 550 |
| Wyeth | 62 | 561 | 500 |
| Wyeth | 9,612 | 10,111 | 500 |
| Wyeth | 51,242 | 51,741 | 500 |
| Wyeth | 130,730 | 131,229 | 500 |

[0740] To further investigate the composition of POXSTG19503 genome, the percentage of nucleic acid identity was explored by global pairwise alignments with the genome of parental viruses, using Mafft (Table 3). Nucleic acid sequence of POXSTG19503 core region was 91.8% identical to COP, 84.6% identical to CPX, 86.5% identical to MVA, 94.8% identical to RPX, 96.5% identical to WR and 94.9% identical to Wyeth.

TABLE 4
Percentage of nucleic acid identity between
POXSTG19503 and the 6 parental genomes

| | COP | CPX | MVA | RPX | WR | Wyeth |
|---|---|---|---|---|---|---|
| POXSTG19503 | 91.8 | 84.6 | 86.5 | 94.8 | 96.5 | 94.9 |

[0741] Multiple alignment of the core-genome region of POXSTG19503, RPX, CPX, WR, Wyeth, COP and MVA (with Mauve) showed the almost perfect conservation of the genome organization, with no structural variant such as large insertion, deletion or inversion detected when comparing POXSTG19503 to the parental genomes (FIG. 2B). Consequently, almost all the Open Reading Frames and their relative positions in the viral genomes were also conserved in POXSTG19503.

### Deletion of J2R Gene Improves Efficacy and Safety of the Chimeric Poxvirus

[0742] The coding sequence of GFP-FCU1 (GFP::FCU1) fusion gene was introduced into the J2R (TK) locus of POXSTG19503 to generate the thymidine-deleted chimeric poxvirus POXSTG19508. The GFP::FCU1 fusion protein exhibits cytidine deaminase (CDase) and uracil-phosphoribosyltransferase (UPRTase) activities similar to those of the FCU1 protein and displays a fluorescent signal intensity equivalent to the one of native eGFP protein (Ricordel et al., 2017, Molecular Therapy Oncolytics, 7:1-11).

[0743] Oncolytic activities of the thymidine-deleted chimeric poxvirus POXSTG19508 and the thymidine-deleted parental strains (VACV strains Copenhagen, Western Reserve, Wyeth, MVA, Cowpox virus strain Brighton and Rabbitpox virus strain Utrecht) were compared in A549 (FIG. 3A), HCT116 (FIG. 3B) and HepG2 (FIG. 3C) tumor cells. The viral efficacy of the chimeric poxvirus was not affected by TK knockout. Moreover, POXSTG19508 showed better oncolytic efficacy than all 6 parental poxvirus strains indicating that virus chimerization can generate a backbone virus that is more efficient than its parental viruses.

[0744] Most of the following comparisons were made against the Vaccinia virus strain Copenhagen. In fact, Rabbitpox viruses are too virulent to be used as oncolytic viruses for treating human cancers. They were, however, used as comparators for EEV production, as they are known to be good EEV producers.

[0745] Cowpox viruses showed a too weak oncolytic power in vivo to be an interesting comparison element. Moreover, in vitro and in vivo preclinical studies have recently shown that the Copenhagen strain has a more potent oncolytic viral activity against human tumor cells than the Wyeth and the WR strains (Foloppe et al., 2019, Mol. Ther. Oncolytics Vol.14, 1-14), and MVA is known to be not oncolytic.

[0746] Compared to COP wild-type, the chimeric wild-type POXSTG19503 produced more viral particles in HepG2 tumor cells (FIG. 4A). The chimeric wild-type POXSTG19503 also demonstrated a reduced replication on primary cells (FIG. 4A): as compared to COP wild-type, 2-fold and 4-fold reduction of replication were observed respectively in human reconstituted skin model and hepatocytes. Consequently, the specificity index calculated from the ratio between viral fold amplification obtained in HepG2 hepatocarcinoma cells and hepatocytes was largely improved for the chimeric poxvirus POXSTG19503 (FIG. 4B).

[0747] Moreover, J2R deletion had a clear benefit on POXSTG19508 allowing a supplementary 8-fold reduction of replication in human skin and hepatocytes (FIG. 4A). These results are consistent with previously reports demonstrating the benefit of deleting J2R gene for reducing virus replication of poxviruses in non-cancerous cells (Foloppe et al., 2019, Mol Ther Oncolytics, 14, 1-14; Ricordel et al., 2017, Molecular Therapy Oncolytics, 7:1-11; Ricordel et al., 2018, Cancers (Basel), 10, doi: 10.3390/cancers10070231; Ricordel et al., 2018, Oncotarget 9, 35891-35906).

[0748] Therefore, the ratio of viral progeny produced on HepG2 tumor cells to that in human primary hepatocytes, was largely improved for POXSTG19508 where the transgene was inserted into the J2R locus (FIG. 4B).

### POXSTG19508 Shows Superior CDase Activity Relative to Parental Virus

[0749] POXSTG19508 expressed the therapeutic gene FCU1, fused with eGFP, that catalyzes the conversion of 5-FC into 5-FU and its derivates metabolites (Erbs et al, 2000, Cancer research, 60, 3813-3822). Expression of functional FCU1 protein by POXSTG19508 was confirmed by quantification of 5-FU released into the supernatant of infected cells and was compared to the expression of FCU1 encoded by the thymidine-deleted vaccinia virus strain Copenhagen (VVTG17111) (FIG. 5). The analysis of A549 cells supernatant by HPLC showed a progressive release of 5-FU into the extracellular medium of cells infected with the indicated viruses at a MOI of 10⁻⁴ and incubated with 1 mM 5-FC. Two and 3 days after infection with the virus VVTG17111, respectively 15% and 60% of 5-FC was converted to 5-FU in the supernatant. At these same collection times, more than 40% and 90% of 5-FC was deaminated to 5-FU in the supernatant of POXSTG19508 infected cells, indicating higher expression of FCU1 following increased replication of the chimeric poxvirus in tumor cells.

### Chimeric Poxvirus Produces More EEV and Forms Comets

[0750] We analysed the production of EEV and IMV in A549 cancer cells (FIGS. 6, 7 and 8). A549 cells were seeded in six-well plates and the next day infected with the thymidine-deleted vaccinia virus strain Copenhagen (VVTG17111) and the thymidine-deleted chimeric poxvirus POXSTG19508 at MOI of 0.1. At 16 and 24 hours after infection, supernatant (for EEV) or cell fraction (for IMV) were harvested, and infectious viruses were quantified by plaque assays on CEFs. At different time post-infection (16 and 24 hours), the yields of total virus (both IMV and EEV) from POXSTG19508 were two-fold higher than VVTG17111, whereas the yields of EEV form produced from POXSTG19508 were 20- to 40-fold more than that from VVTG17111 (FIG. 6A, FIG. 6B). These results showed that the ratio of EEV to IMV was around 0.5% for the vaccinia virus strain Copenhagen (FIG. 6C), consistent with published results (Spehner et al., 2000, Virology, 273, 9-15, doi: 10.1006/viro.2000.0411). For the chimeric poxvirus, this ratio was markedly increased to over 5% and 10% at 16 and 24 hours, respectively (FIG. 6C).

[0751] The amount of EEV released by infected cells into the culture medium can be qualitatively monitored by a standard plaque assay performed under liquid overlay. In this assay, viruses that release large amounts of EEV give rise to plaques with a characteristic comet shape (Smith et al., 1998, Adv Exp Med Biol, 440, 395-414). The comet tail is believed to form by small secondary plaques derived from EEV released by the primary infected cell. As expected, the chimeric poxvirus POXSTG19508, which produced large amounts of EEV, forms comet-shaped virus plaques under liquid overlay while the parental vaccinia virus strain Copenhagen does not (FIG. 7).

[0752] A549 cells were seeded in six-well plates and the next day infected with the Vaccinia Virus strain IHD-J (a strain known to form high level of EEV in supernatant), the thymidine-deleted rabbitpox virus encoding GFP (RPXTG19095) or the thymidine-deleted chimeric poxvirus POXSTG19508 at MOI of 0.1. At 16 and 24 hours after infection, supernatant (for EEV) or cell fraction (for IMV) were harvested, and infectious viruses were quantified by plaque assays on CEFs. At different time post-infection (16 and 24 hours), the yields of total virus (both IMV and EEV) from POXSTG19508 were higher than RPXTG19095, whereas the yields of EEV form produced from POXSTG19508 were higher than that from RPXTG19095 (FIG. 8A, 8B). These results showed that the ratio of EEV to IMV was around 3% and 4% for the Vaccinia Virus strain IHD-J at 16 and 24 hours, respectively, around 5% and 4% for the rabbitpox virus at 16 and 24 hours, respectively. For the chimeric poxvirus, this ratio was markedly increased to over 6% and 12% at 16 and 24 hours, respectively (FIG. 8C).

### Chimeric Poxvirus Escapes Neutralization by Immunized Serum.

[0753] To compare neutralization resistance, immunized serum from patient treated by TG6002 was mixed with respectively TG6002 or POXSTG19508, and cytotoxicity of the escaped viruses were evaluated. As expected, TG6002 was strongly neutralized by immunized serum (FIG. 9A), resulting in an increase in EC50 (FIG. 9C). In contrast, the chimeric poxvirus POXTG19508 escaped neutralization at the same concentration of immunized serum (FIG. 9B) without significant modification in the EC50 value (FIG. 9C).

### Chimeric Poxvirus Shows Enhanced Capacity for Tumoral Spread.

[0754] We evaluated the ability of the viruses to propagate in the tumor after either a systemic injection in a xenograft model or after an IT injection in a syngeneic model. In the xenograft HCT116 model, virus staining was similar 2 days after IV injection of VVTG17111 and POXSTG19508 with about minus 2% positive tumor area. Following replication of VVTG17111, virus staining increases to reach approximately 10% to 20% of tumor area one to two weeks post-injection. Patches of virus staining increase more strongly for POXSTG19508 to reach more than 50% of tumor area indicating more pronounced tumor spreading of the chimeric poxvirus in human tumors (FIG. 10A, FIG. 10B). In the syngeneic B16F10 model, vaccinia was weak (D3 post-injection) or absent (D8 post-injection) after IT injection of VVTG17111 and staining for vaccinia antigen was strong in tumors injected with POXST19508 indicating the increased capacity for intratumoral spreading of the chimeric poxvirus in murine tumors (FIG. 11A, FIG. 11B).

### Chimeric Poxvirus Shows Enhanced Oncolytic Potency in Various Tumor Mouse Models.

[0755] We compared the oncolytic activity of the chimeric poxvirus POXSTG19508 and TG6002 in xenograft and syngeneic tumor models.

[0756] Nude mice bearing HCT116 tumors were injected intravenously with virus TG6002 and POXSTG19508, both at 3×10⁴ PFU (suboptimal dose of TG6002 for HCT116 model). As shown in FIG. 12A, a single intravenous injection of POXSTG19508 resulted in a superior inhibition of tumor growth (reduction in tumor volume for 6 out of 9 tumors 78 days post-tumor implantation) compared to TG6002 (reduction in tumor volume for 3 out of 9 tumors 78 days post-tumor implantation). As shown in FIG. 12B, comparison of survival curves showed that POXSTG19508 increased mouse survival compared to TG6002.

[0757] Nude mice bearing HepG2 tumors were injected intravenously with virus TG6002 and POXSTG19508, both at 3×10⁵ PFU (suboptimal dose of TG6002 for HepG2 model). As shown in FIG. 13A, a single intravenous injection of POXSTG19508 resulted in a superior inhibition of tumor growth compared to TG6002. As shown in FIG. 13B, comparison of survival curves showed that POXSTG19508 increased mouse survival compared to TG6002.

[0758] Because murine tumors are less susceptible to oncolytic vaccinia virus, the two viruses were injected three times intratumorally and at high dose (1×10⁷ PFU) in mice bearing murine CT26 tumors, known for being resistant to Vaccinia viruses. As expected, no tumor growth control was obtained using TG6002 in this model, whereas treatment with POXSTG19508 slowed tumor progression (FIG. 14A), resulting in an increase in mice survival (FIG. 14B).

### Chimeric Poxvirus Efficiently Spreads to Distant Tumors in a Human Tumor Xenograft

[0759] Nude mice bearing bilateral HCT116 xenografts in their flanks were injected intratumorally with PBS or 10⁶ PFU of TG6002 or POXST19508 in only one of the two tumors. A single intratumoral injection of TG6002 and POXST19508 induced strong antitumor effect in injected tumors (FIG. 15A).

[0760] Moreover, unlike TG6002, POXST19508 was able to disseminate to distant uninjected tumors and showed antitumor effect in these tumors (FIG. 15B). More importantly, POXST19508 treatment significantly increased the survival of mice compared to PBS or TG6002 treated group (FIG. 15C). In a parallel experiment, three mice per group were euthanized on day 13 after virus injection, and virus titers in tumors were determined. Equivalent amounts of the two viruses were detected in injected tumors indicating the replication of the viruses in the tumors (FIG. 15D). However, compared to TG6002, higher titers of POXST19508 were detected in uninjected tumors, confirming superior spread of the chimeric poxvirus (FIG. 15D).

### Similar Properties of a Double Deleted TK-RR-Variant

[0761] The oncolytic power, viral replication on primary cells, therapeutic index, EEV-secretion capacity, spreading capacity and neutralization rate in the presence of anti-poxvirus antibodies of a variant chimeric poxvirus defective in J2R locus and 14L locus (POXSTG19730) were evaluated and compared to the corresponding functions of the variant parental COP defective in J2R locus and 14L locus. The obtained results showed that the further deletion in 14L locus had no deleterious impact on the above-mentioned functionalities. Furthermore, compared to what was observed for the variant viruses defective in the J2R locus only, the hierarchy of results was respected: the variant chimeric poxvirus defective in J2R locus and 14L locus had a higher oncolytic power, a lower viral replication on primary cells, a higher therapeutic index, a higher EEV-secretion capacity, a higher spreading capacity, and a lower neutralization rate in the presence of anti-poxvirus antibodies than the variant parental COP defective in the J2R locus and 14L locus (data not shown).

Systemic Administration of the Chimeric Poxvirus Expressing mIL-12 Shows Significant Antitumor Activity in the Syngeneic B16F10 Mouse Model.

[0762] To improve the in vivo efficacy associated with the VACV and the chimeric poxvirus, the immunomodulatory cytokine murine IL-12 (mIL-12) was incorporated into the 14L region of the viruses under the control of the pH5R promoter. The antitumor effect of the double (TK/RR)-deleted viruses, expressing or not murine IL-12, was evaluated in syngeneic mouse model. Immunocompetent mice with subcutaneous murine B16F10 tumors were treated with either PBS, double deleted VACV expressing mIL-12 (VVTG19328) and double deleted chimeric poxvirus expressing mIL-12 (POXSTG19847) via IV delivery on day 7 and 9 after tumor implantation. This is an aggressive tumor model, however, IV administration of the chimeric poxvirus expressing mIL-12 (POXSTG19847) was able to slow tumor growth (FIG. 16A) and also enhanced survival compared with VACV expressing mIL12 (FIG. 16B).

### Chimeric Virus Induced Syncytia Formation

[0763] Vaccinia virus strain Copenhagen (COP) or chimeric poxvirus were used to infect HCT 116 human cancer cells, and the cell-to-cell fusion was observed by optical and fluorescence microscopy. Infection with the thymidine-deleted Vaccinia virus strain Copenhagen (VVTG17111) resulted in an altered cell morphology, with individual and compartmentalized round cells with no fused cells (FIG. 17). In contrast to the thymidine-deleted Vaccinia virus strain Copenhagen, infection with the thymidine-deleted chimeric poxvirus POXSTG19508 induced syncytia formation with large cells generate by the fusion of membranes from neighboring cells (FIG. 17). Moreover, the cell density indicated that the cell viability following POXSTG19508 infection was more reduced than that following VVTG17111 (FIG. 17), and even more with post-infection time (60h compared to 40h post-infection).

### Chimeric Virus Induced a Superior Specific T Cell Response Against Tumor

[0764] To assess tumor and virus-specific T cell responses after therapy, mice bearing CT26 tumors were treated intratumorally with vehicle, VVTG17111 or POXSTG19508 and splenocytes were collected on day 6 post injection and stimulated with a tumor associated peptide antigen (AH-1), a VACV-specific peptide (S9L8) or an irrelevant peptide. The results show that the treatment by POXSTG19508 significantly increased the number of reactive T cells against (FIG. 18) AH-1 compared to treatment by VVTG17111. Additionally, the VACV-specific (S9L8) immune response was similar after treatment with VVTG17111 or POXSTG19508 (FIG. 18). Taken together, these results suggest that chimeric poxvirus elicits an anti-tumor T-cell response superior to that induced by Vaccinia virus strain Copenhagen (VVTG17111) without eliciting a greater anti-viral T-cell response.

### Chimeric Virus Shows Resistance to Complement-Mediated Virus Neutralization by Human Serum

[0765] To determine the susceptibility of viruses to complement-mediated lysis, TG6002 and POXSTG19508 were incubated with human serum and functional virus titer was assessed by plaque assays. Heat inactivated serum was used as a negative control. The titer of TG6002 decreased to 7% in the presence of human serum, compared with titer in the presence of heat-inactivated serum (FIG. 19). In contrast, the titer of POXSTG19508 only decreased to 48% in the presence of human serum (FIG. 19), indicating for the chimeric poxvirus an improved resistance to complement-mediated virus neutralization.

### BIBLIOGRAPHIC REFERENCES

[0766] Beguin et al., 2020, Mol Ther Oncolytics, 19, 57-66
[0767] Broyles et al., 1993, Virol. 195:863-5
[0768] Buller et al., 1985, Nature, 317 (6040): 813-5
[0769] Burton et al., 2019, Mol Ther Oncolytics, 15, 131-139
[0770] Caroll et al., 1997, Virology 238:198-211
[0771] Carrey et al., 2011, PLOS ONE, 6 (7) e22442
[0772] Carrey et al., 2014, Sci Rep 4:6154 doi 10.1038
[0773] Chakrabarti et al., 1997, Biotechniques, 23:1094-7
[0774] Chaurasiya et al., 2020, Cancer Gene Therapy 27:125-135
[0775] Chernajovsky et al., 2006, BMJ, 332 (7534): 170-2
[0776] Chu et al., 1997, J. Exp. Med., 186:1623
[0777] Dayhoffed, 1981, Suppl., 3:482-9
[0778] Erbs et al., 2000, Cancer Res., 60 (14): 3813-22
[0779] Erbs et al., 2008, Cancer Gene Ther. 2008, 15, 18-28
[0780] Fallaux et al., 1998, Human Gene Ther. 9:1909-17
[0781] Fenner and Comben, 1958, Virology, 5, 530-548
[0782] Filley et al., 2017, Front Oncol. 7, 106. doi: 10.3389/fonc.2017.00106
[0783] Foloppe et al., 2008, Gene Ther., 15, 1361-1371. doi: 10.1038/gt.2008.82
[0784] Foloppe et al., 2019, Mol Ther Oncolytics, 14, 1-14
[0785] Graham et al., 1997, J. Gen. Virol. 36:59-72
[0786] Guse et al., 2011, Expert Opinion Biol. Ther.11 (5): 595-608
[0787] Haddad et al., 2017, Front Oncol., 7, 96. doi: 10.3389/fonc.2017.00096
[0788] Hammad et al., 2020, Mol. Ther. Oncolytics, vol. 19 p. 278-282
[0789] Hammond et al., 1997, J. Virol. Methods, 66:135-8
[0790] Heinrich et al., 2017, Onco Targets Ther., 10, 2389-2401. doi: 10.2147/OTT.S126320
[0791] Heo et al., 2013 Nat Med., 19, 329-336. doi: 10.1038/nm.3089
[0792] Hermiston et al., 2006, Curr. Opin. Mol. Ther., 8 (4): 322-30
[0793] Hruby, 1990, Clin. Microbiol. Rev., 3 (2) 153-170
[0794] Katoh et al., 2002, Nucleic Acids Res. 30, 3059-3066
[0795] Kirn et al., 2008, Cancer Res. 68 (7): 2071-5
[0796] Koerber et al., 2006, Nat. Protocols 1 (2) p.701-706
[0797] Krabbe et al., 2018, Cancers, 10, 216
[0798] Kritsch et al., 2005, J. Chromatogr. Anal. Technol. Biomed. Life Sci., 822:263-70
[0799] Kumar and Boyle, 1990, Virology, 179:151-8
[0800] Li et al., 2005, Journal of General Virology, 86, 2969-2977
[0801] Macedo et al., 2020, Journal for Immuno Therapy of Cancer; 8
[0802] McFadden, 2005, Nat Rev Microbiol., 3, 201-213
[0803] Mell et al., 2017, Clin Cancer Res., 23, 5696-5702. doi: 10.1158/1078-0432.CCR-16-3232
[0804] Needleman et Wunsh. J.Mol., 1970, Biol. 48,443-453
[0805] Nurk et al., 2013, J Comput Biol., 20, 714-737. doi: 10.1089/cmb.2013.0084
[0806] O'Leary et al., 2018, Mol. Therap. Vol 9:13-21
[0807] Pastor-Anglada et al, 2015, Front. Pharmacol., 6 (13): 1-14
[0808] Paszkowski et al., 2016, PLOS Pathogens, 12 (8) e1005824
[0809] Ribi et al., 1986, Plenum Publ. Corp., 407-419
[0810] Ricordel et al., 2017, Molecular Therapy Oncolytics, 7:1-11
[0811] Ricordel et al., 2018, Cancers (Basel), 10, doi: 10.3390/cancers10070231
[0812] Ricordel et al., 2018, Oncotarget 9, 35891-35906
[0813] Smith et al., 1998, Adv Exp Med Biol, 440, 395-414
[0814] Smorlesi, 2005, Gene Ther. 12:1324
[0815] Spehner et al., 2000, Virology, 273, 9-15, doi: 10.1006/viro.2000.0411
[0816] Suader, 2000, J. Am Acad Dermatol. 43: S6
[0817] Sumino et al., 1998, J.Virol. 72:4931
[0818] Torres-Domingez et al., 2019, Review Expert Opin Biol Ther.; 19 (6): 561-573
[0819] Tritel et al., 2003, J. Immunol., 171:2358
[0820] Turner et al. 2008, Virology 380, 226-233
[0821] Van der Maaden et al., 2012, J. Control release 161:645-55
[0822] Zeh et al., 2015, Mol Ther., 23, 202-214. doi: 10.1038/mt.2014.194
[0823] Zhang et al., 2007, Cancer Res. 67:10038-46
[0824] EP998568
[0825] EP17306012.0
[0826] EP3562946
[0827] EP2018/066668
[0828] U.S. Pat. No. 6,054,438
[0829] U.S. Pat. No. 8,394,385
[0830] U.S. Pat. No. 8,772,023
[0831] WO96/16183
[0832] WO98/02522
[0833] WO98/04727
[0834] WO98/37095
[0835] WO98/56415
[0836] WO01/66137
[0837] WO03/053463
[0838] WO2005/042728
[0839] WO2005/07857
[0840] WO2006/108846
[0841] WO2007/056847
[0842] WO2007/147528
[0843] WO2007/147529
[0844] WO2008/114021
[0845] WO2008/129058
[0846] WO2008/138533
[0847] WO2009/065546
[0848] WO2009/100521
[0849] WO2010/130753
[0850] WO2010/130756
[0851] WO2011/128704
[0852] WO2012/001075
[0853] WO2013/022764
[0854] WO2014/053571
[0855] WO2014/063832
[0856] WO2018/031694
[0857] WO2020011754

1.-55. (canceled)

56. A chimeric poxvirus comprising a nucleic acid sequence having a sequence identity of at least 96.6% with SEQ ID NO:1.

57. The chimeric poxvirus of claim 56, wherein the chimeric poxvirus comprises nucleic acid fragments from Rabbitpox virus strain Utrecht (RPX), Cowpox virus strain Brighton (CPX), Vaccinia virus strain Copenhagen (COP), Vaccinia virus strain Wyeth (WY), Vaccinia virus strain Western Reserve (WR), and Modified Vaccinia virus strain Ankara (MVA).

58. The chimeric poxvirus of claim 56, wherein the chimeric poxvirus comprises a glutamic acid in position 151 of the A34R gene.

59. The chimeric poxvirus of claim 56, wherein the chimeric poxvirus comprises:
(a) at least one Rabbitpox virus strain Utrecht (RPX)-derived nucleic acid sequence selected from:
i. a nucleic acid sequence consisting of nucleotides 562 to 4701 of SEQ ID NO:2 or a sequence with at least 99% identity with nucleotides 562 to 4701 of SEQ ID NO:2,
ii. a nucleic acid sequence consisting of nucleotides 54042 to 59851 of SEQ ID NO:2 or a sequence with at least 99% identity with nucleotides 54042 to 59851 of SEQ ID NO:2,
iii. a nucleic acid sequence consisting of nucleotides 83610 to 88879 of SEQ ID NO:2 or a sequence with at least 99% identity with nucleotides 83610 to 88879 of SEQ ID NO:2,
iv. a nucleic acid sequence consisting of nucleotides 127290 to 130589 of SEQ ID NO:2 or a sequence with at least 99% identity with nucleotides 127290 to 130589 of SEQ ID NO:2,
v. a nucleic acid sequence consisting of nucleotides 137520 to 154979 of SEQ ID NO:2 comprising a glutamic acid in position 151 or a sequence with at least 99% identity with nucleotides 137520 to 154979 of SEQ ID NO:2 comprising a glutamic acid in position 151, and
vi. a nucleic acid sequence consisting of nucleotides 157002 to 162091 of SEQ ID NO:2 or a sequence with at least 99% identity with nucleotides 157002 to 162091 of SEQ ID NO:2;
(b) at least one Cowpox virus strain Brighton (CPX)-derived nucleic acid sequence selected from:
i. a nucleic acid sequence consisting of nucleotides 14242 to 51241 of SEQ ID NO:3 or a sequence with at least 99% identity with nucleotides 14242 to 51241 of SEQ ID NO:3, and
ii. a nucleic acid sequence consisting of nucleotides 59852 to 72141 of SEQ ID NO:3 or a sequence with at least 99% identity with nucleotides 59852 to 72141 of SEQ ID NO:3;
(c) at least one Copenhagen (COP)-derived nucleic acid sequence selected from:
i. a nucleic acid sequence consisting of nucleotides 7612 to 8521 of SEQ ID NO:4 or a sequence with at least 99% identity with nucleotides 7612 to 8521 of SEQ ID NO:4;
(d) at least one Wyeth (WY)-derived nucleic acid sequence selected from:
i. a nucleic acid sequence consisting of 76630 to 78639 of SEQ ID NO:5 or a sequence with at least 99% identity with nucleotides 76630 to 78639 of SEQ ID NO:5,
ii. a nucleic acid sequence consisting of 81060 to 83529 of SEQ ID NO:5 or a sequence with at least 99% identity with nucleotides 81060 to 83529 of SEQ ID NO:5,
iii. a nucleic acid sequence consisting of 116250 to 118459 of SEQ ID NO:5 or a sequence with at least 99% identity with nucleotides 116250 to 118459 of SEQ ID NO:5,
iv. a nucleic acid sequence consisting of 162290 to 164599 of SEQ ID NO:5 or a sequence with at least 99% identity with nucleotides 162290 to 164599 of SEQ ID NO:5,
v. a nucleic acid sequence consisting of 176100 to 179909 of SEQ ID NO:5 or a sequence with at least 99% identity with nucleotides 176100 to 179909 of SEQ ID NO:5, and
vi. a nucleic acid sequence consisting of 181920 to 184099 of SEQ ID NO:5 or a sequence with at least 99% identity with nucleotides 181920 to 184099 of SEQ ID NO:5;
(e) at least one Western Reserve (WR)-derived nucleic acid sequence selected from:
i. a nucleic acid sequence consisting of 169190 to 171579 of SEQ ID NO:6 or a sequence with at least 99% identity with nucleotides 169190 to 171579 of SEQ ID NO:6, and
ii. a nucleic acid sequence consisting of 173730 to 176099 of SEQ ID NO:6 or a sequence with at least 99% identity with nucleotides 173730 to 176099 of SEQ ID NO:6;
(f) at least one Modified Vaccinia Virus Ankara (MVA)-derived nucleic acid sequence selected from:
i. a nucleic acid sequence consisting of 88880 to 90899 of SEQ ID NO:7 or a sequence with at least 99% identity with nucleotides 88880 to 90899 of SEQ ID NO:7,
ii. a nucleic acid sequence consisting of 91460 to 93839 of SEQ ID NO:7 or a sequence with at least 99% identity with nucleotides 91460 to 93839 of SEQ ID NO:7,
iii. a nucleic acid sequence consisting of 95530 to 116249 of SEQ ID NO:7 or a sequence with at least 99% identity with nucleotides 95530 to 116249 of SEQ ID NO:7,
iv. a nucleic acid sequence consisting of 118460 to 127289 of SEQ ID NO:7 or a sequence with at least 99% identity with nucleotides 118460 to 127289 of SEQ ID NO:7, and
v. a nucleic acid sequence consisting of 134800 to 137519 of SEQ ID NO:7 or a sequence with at least 99% identity with nucleotides 134800 to 137519 of SEQ ID NO:7;
or
(g) any combination of (a) to (f).

60. The chimeric poxvirus of claim 56, wherein:
(a) for at least one tumor, the oncolytic power of the chimeric poxvirus is higher than the oncolytic power measured in the same conditions and at the same time post-infection of at least one of the five wild-type parental oncolytic poxvirus strains RPX, CPX, COP, WY, and WR, wherein for a given tumor, a given virus, given conditions, and a given time post-infection, the oncolytic power OP(tumor, virus, conditions, time post-infection) is defined as:
OP(tumor, virus, conditions, time post-infection)=(100−percentage of surviving tumor cells after infection by virus);
(b) for at least one healthy cell, the viral replication in the healthy cell of the chimeric poxvirus is lower than that of at least one of the five oncolytic parental poxvirus strains Rabbitpox virus strain Utrecht (RPX), Cowpox virus strain Brighton (CPX), Vaccinia virus strain Copenhagen (COP), Vaccinia virus strain Wyeth (WY), and Vaccinia virus strain Western Reserve (WR);
(c) for at least one organ, the therapeutic index of the chimeric poxvirus is higher than the therapeutic index measured in the same conditions and at the same time post-infection of at least one of the five oncolytic parental poxvirus strains Rabbitpox virus strain Utrecht (RPX), Cowpox virus strain Brighton (CPX), Vaccinia virus strain Copenhagen (COP), Vaccinia virus strain Wyeth (WY), and Vaccinia virus strain Western Reserve (WR), wherein for a given organ, a given tumor, a given virus, given conditions and a given time post-infection, an organ-specific therapeutic index TI (organ, tumor, virus, conditions, time post-infection) is defined as:
TI(organ, tumor, virus, conditions, time post-infection)=(replication of virus in organ tumor cells/replication of virus in organ healthy cells);
(d) for at least one producer cell, the extracellular-enveloped virus (EEV)-secretion capacity (SC) (EEV-SC) of the chimeric poxvirus is higher than the EEV-SC measured in the same conditions and at the same time post-infection of at least one of the six parental poxvirus strains Rabbitpox virus strain Utrecht (RPX), Cowpox virus strain Brighton (CPX), Vaccinia virus strain Copenhagen (COP), Vaccinia virus strain Wyeth (WY), Vaccinia virus strain Western Reserve (WR), and Modified Vaccinia virus strain Ankara (MVA), wherein, for a given virus, a given producer cell, given conditions and a given time post-infection, an EEV-SC (virus, producer cell, conditions, time post-infection) is defined as:
EEV-SC (virus, producer cell, conditions, time post-infection)=number of EEV particles/number of (EEV+IMV) particles;
(e) for at least one producer cell, the extracellular-enveloped virus (EEV)-secretion capacity (SC) (EEV-SC) of the chimeric poxvirus is higher than the EEV-SC measured in the same conditions and at the same time post-infection of the wild-type Vaccinia virus strain IHD-J;
(f) for at least one tumor, the spreading capacity of the chimeric poxvirus is higher than the spreading capacity measured in the same conditions and at the same time post-infection of at least one of the six parental poxvirus strains Rabbitpox virus strain Utrecht (RPX), Cowpox virus strain Brighton (CPX), Vaccinia virus strain Copenhagen (COP), Vaccinia virus strain Wyeth (WY), Vaccinia virus strain Western Reserve (WR), and Modified Vaccinia virus strain Ankara (MVA);
(g) for at least one poxvirus-specific antibody and tumor, the neutralization rate of the chimeric poxvirus is lower than the neutralization rate measured in the same conditions and at the same time post-infection of at least one of the six parental poxvirus strains (optionally variant and/or recombinant) Rabbitpox virus strain Utrecht (RPX), Cowpox virus strain Brighton (CPX), Vaccinia virus strain Copenhagen (COP), Vaccinia virus strain Wyeth (WY), Vaccinia virus strain Western Reserve (WR), and Modified Vaccinia virus strain Ankara (MVA), wherein, for a given virus, a given tumor, a given poxvirus-specific antibody, given conditions and a given time post-infection, the neutralization rate (NT(virus, tumor, conditions, time post-infection)) is defined as:
NT(virus, tumor, poxvirus-specific antibody, conditions, time post-infection)=EC50 (with poxvirus-specific antibody)/EC50 (without poxvirus-specific antibody); or
(h) any combination of (a) to (g).

61. The chimeric poxvirus of claim 60, wherein:
(i) the oncolytic power in measured in at least one tumor cell selected from A549, MIA Paca-2, U-87-MG, B16F10, and HepG2 tumor cell lines;
(ii) the replication in at least one healthy cell is measured in at least one healthy cell selected from skin cells and hepatocytes;
(iii) the therapeutic index is measured in liver, organ healthy cells are healthy (preferably primary) hepatocytes and organ tumor cells are HepG2 tumor cells;
(iv) the extracellular-enveloped virus secretion capacity (EEV-SC) is measured in a producer cell that is is A549 tumor cell line; or
(v) any combination of (i) to (iv).

62. The chimeric poxvirus of claim 56, which has been or may be obtained by a method of directed evolution, wherein the method comprises:
(i) infecting a first tumor cell line with a plurality of parental poxvirus strains, wherein the tumor cell line is permissive for each parental poxvirus strain, so as to obtain a first infected tumor cell line;
(ii) amplifying the parental poxvirus strains on the first infected tumor cell line of step (i) during at least 12 h and at most 3 days, so as to obtain one or more distinct chimeric poxviruses through homologous genomic recombination between at least two of the parental poxvirus strains in supernatant;
(iii) collecting the supernatant at the end of step (ii) containing the one or more distinct chimeric poxvirus(es);
(iv) infecting a second tumor cell line with the one or more distinct chimeric poxvirus(es) of the supernatant of step (iii), wherein the second tumor cell line is permissive for each parental poxvirus strain of steps (i) and (ii), so as to obtain a second infected tumor cell line;
(vₐ) amplifying the one or more distinct chimeric poxvirus(es) of step (iv) on the second infected tumor cell line of step (iv) during preferably at least 12 h and at most 24 h and then collecting the supernatant;
(vi) selecting one or more distinct chimeric poxvirus(es) of step (vₐ) having, for at least one third tumor cell line, an oncolytic power higher than the oncolytic power measured in the same conditions and at the same time post-infection of at least one parental oncolytic poxvirus strain in the first tumor cell line of step (i) and/or in the second tumor cell line of step (iv), wherein for a given tumor, a given virus, given conditions and a given time post-infection, an oncolytic power OP(tumor, virus, conditions, time post-infection) is defined as:
OP(tumor, virus, conditions, time post-infection)=(100-percentage of surviving tumor cells after infection by virus).

63. The chimeric poxvirus of claim 62, wherein:
(a) the parental poxviruses strains used in first step (i) are selected in the group consisting of Rabbitpox virus strain Utrecht (RPX), Cowpox virus strain Brighton (CPX), Vaccinia virus strain Copenhagen (COP), Vaccinia virus strain Western Reserve (WR), Vaccinia virus strain Wyeth (WY), Modified Vaccinia virus strain Ankara (MVA), Raccoonpox virus strain Herman (RCN), ORF virus strain NZ2 (ORF), Pseudocowpox strain TJS (PCP), Bovine Papular stomatitis virus strain Illinois 721 (BPS), Myxoma virus strain Lausanne (MYX), Squirrelpox virus strain Kilham (SQF), Fowlpox virus strain FP9 (FPV), Swinepox virus strain Kasza (SPV), Yaba-like disease virus strain Davis (YLD), and Cotia virus strain SP An 232 (CTV);
(b) the permissive tumor cell lines of the method of directed evolution are from higher mammal's origins, preferably the permissive tumor cell lines are selected in the group consisting of A549, CAL-33, HepG2, HCT116, Hela, SK-MEL-1, PANC-1, Hs746T, SK-OV-3, and CV-1; and
(c) both (a) and (b).

64. A variant chimeric poxvirus, consisting of a chimeric poxvirus of claim 56 that has been modified by altering one or more poxviral gene(s).

65. The variant chimeric poxvirus of claim 64, wherein the variant chimeric poxvirus is defective in the J2R locus.

66. The variant chimeric poxvirus of claim 65, wherein the variant chimeric poxvirus comprises a nucleic acid sequence having a sequence identity of at least 99% with SEQ ID NO:8.

67. The variant chimeric poxvirus of claim 65, wherein:
(a) for at least one tumor, the oncolytic power of the variant chimeric poxvirus is higher than the oncolytic power measured in the same conditions and at the same time post-infection of at least one of the five variant parental oncolytic poxvirus strains RPX, CPX, COP, WY, and WR defective in the J2R locus, wherein for a given tumor, a given virus, given conditions, and a given time post-infection, the oncolytic power OP(tumor, virus, conditions, time post-infection) is defined as:
OP(tumor, virus, conditions, time post-infection)=(100-percentage of surviving tumor cells after infection by virus);
(b) for at least one healthy cell, the viral replication in the healthy cell of the variant chimeric poxvirus is lower than that of at least one of the five variant oncolytic parental poxvirus strains Rabbitpox virus strain Utrecht (RPX), Cowpox virus strain Brighton (CPX), Vaccinia virus strain Copenhagen (COP), Vaccinia virus strain Wyeth (WY), and Vaccinia virus strain Western Reserve (WR) defective in the J2R locus;
(c) for at least one organ, the therapeutic index of the chimeric poxvirus defective in the J2R locus is higher than the therapeutic index measured in the same conditions and at the same time post-infection of at least one of the five variant oncolytic parental poxvirus strains Rabbitpox virus strain Utrecht (RPX), Cowpox virus strain Brighton (CPX), Vaccinia virus strain Copenhagen (COP), Vaccinia virus strain Wyeth (WY), and Vaccinia virus strain Western Reserve (WR) defective in the J2R locus, wherein for a given organ, a given tumor, a given virus, given conditions and a given time post-infection, an organ-specific therapeutic index TI(organ, tumor, virus, conditions, time post-infection) is defined as:
TI(organ, tumor, virus, conditions, time post-infection)=(replication of virus in organ tumor cells/replication of virus in organ healthy cells);
(d) for at least one producer cell, the extracellular-enveloped virus (EEV)-secretion capacity (SC) (EEV-SC) of the variant chimeric poxvirus is higher than the EEV-SC measured in the same conditions and at the same time post-infection of at least one of the six variant parental poxvirus strains Rabbitpox virus strain Utrecht (RPX), Cowpox virus strain Brighton (CPX), Vaccinia virus strain Copenhagen (COP), Vaccinia virus strain Wyeth (WY), Vaccinia virus strain Western Reserve (WR), and Modified Vaccinia virus strain Ankara (MVA) defective in the J2R, wherein, for a given virus, a given producer cell, given conditions and a given time post-infection, an EEV-SC (virus, producer cell, conditions, time post-infection) is defined as:
EEV-SC (virus, producer cell, conditions, time post-infection)=number of EEV particles/number of (EEV+IMV) particles;
(e) for at least one producer cell, the extracellular-enveloped virus (EEV)-secretion capacity (SC) (EEV-SC) of the variant chimeric poxvirus is higher than the EEV-SC measured in the same conditions and at the same time post-infection of the wild-type Vaccinia virus strain IHD-J;
(f) for at least one tumor, the spreading capacity of the variant chimeric poxvirus is higher than the spreading capacity measured in the same conditions and at the same time post-infection of at least one of the six variant parental poxvirus strains Rabbitpox virus strain Utrecht (RPX), Cowpox virus strain Brighton (CPX), Vaccinia virus strain Copenhagen (COP), Vaccinia virus strain Wyeth (WY), Vaccinia virus strain Western Reserve (WR), and Modified Vaccinia virus strain Ankara (MVA) defective in the J2R locus;
(g) for at least one poxvirus-specific antibody and tumor, the neutralization rate of the variant chimeric poxvirus is lower than the neutralization rate measured in the same conditions and at the same time post-infection of at least one of the six variant parental poxvirus strains Rabbitpox virus strain Utrecht (RPX), Cowpox virus strain Brighton (CPX), Vaccinia virus strain Copenhagen (COP), Vaccinia virus strain Wyeth (WY), Vaccinia virus strain Western Reserve (WR), and Modified Vaccinia virus strain Ankara (MVA) defective in the J2R locus, wherein, for a given virus, a given tumor, a given poxvirus-specific antibody, given conditions and a given time post-infection, the neutralization rate (NT(virus, tumor, conditions, time post-infection)) is defined as:
NT(virus, tumor, poxvirus-specific antibody, conditions, time post-infection)=EC50 (with poxvirus-specific antibody)/EC50 (without poxvirus-specific antibody); or
(h) any combination of (a) to (g).

68. The chimeric poxvirus of claim 67, wherein:
(i) the oncolytic power in measured in at least one tumor cell selected from A549, MIA Paca-2, U-87-MG, B16F10, and HepG2 tumor cell lines;
(ii) the replication in at least one healthy cell is measured in at least one healthy cell selected from skin cells and hepatocytes;
(iii) the therapeutic index is measured in liver, organ healthy cells are healthy (preferably primary) hepatocytes and organ tumor cells are HepG2 tumor cells;
(iv) the extracellular-enveloped virus secretion capacity (EEV-SC) is measured in a producer cell that is A549 tumor cell line; or
(v) any combination of (i) to (iv).

69. The variant chimeric poxvirus of claim 65, which is defective in one or both of the 14L and F4L loci.

70. The variant chimeric poxvirus of claim 69, wherein the poxvirus comprises a nucleic acid sequence having a sequence identity of at least 99% of identity with SEQ ID NO:9.

71. The variant chimeric poxvirus of claim 69, which is defective in the M2L locus.

72. A recombinant chimeric poxvirus consisting of the chimeric poxvirus of claim 56, which further comprises one or more heterologous nucleic acid(s) of interest inserted in its genome.

73. The recombinant chimeric poxvirus of claim 72, wherein the one or more nucleic acid of interest is selected between immune checkpoint inhibitors, cytokines, agents that affect the regulation of cell surface receptors, agents that affect angiogenesis, agents that stimulates stem cells to produce granulocytes and/or macrophages.

74. A recombinant variant chimeric poxvirus, consisting of the variant chimeric poxvirus of claim 64, which further comprises one or more heterologous nucleic acid(s) of interest inserted in its genome.

75. The recombinant variant chimeric poxvirus of claim 74, wherein the one or more nucleic acid of interest is selected between immune checkpoint inhibitors, cytokines, agents that affect the regulation of cell surface receptors, agents that affect angiogenesis, agents that stimulates stem cells to produce granulocytes and/or macrophages.

76. A process for producing a chimeric poxvirus, a variant chimeric poxvirus, a recombinant chimeric poxvirus, or a recombinant variant chimeric poxvirus, the process comprising:
(i) infecting a producer cell with:
a. himeric poxvirus according to claim 56,
b. a variant chimeric poxvirus consisting of the chimeric poxvirus of claim 56 that has been modified by altering one or more poxviral gene(s),
c. a recombinant chimeric poxvirus consisting of the chimeric poxvirus of claim 56 further comprising one or more heterologous nucleic acid(s) of interest inserted in its genome; or
d. a recombinant variant chimeric poxvirus consisting of the chimeric poxvirus of claim 56 that has been modified by altering one or more poxviral gene(s) and further comprises one or more heterologous nucleic acid(s) of interest inserted in its genome;
(ii) culturing the infected producer cell under conditions which are appropriate for enabling the chimeric poxvirus, variant chimeric poxvirus, recombinant chimeric poxvirus, or recombinant variant chimeric poxvirus to be produced, and;
(iii) recovering the chimeric poxvirus, variant chimeric poxvirus, recombinant chimeric poxvirus, or recombinant variant chimeric poxvirus from the producer cell culture.

77. An isolated nucleic acid encoding:
(i) the chimeric poxvirus according to claim 56,
(ii) a variant chimeric poxvirus consisting of the chimeric poxvirus of claim 56 that has been modified by altering one or more poxviral gene(s),
(iii) a recombinant chimeric poxvirus consisting of the chimeric poxvirus of claim 56 further comprising one or more heterologous nucleic acid(s) of interest inserted in its genome; or
(iv) a recombinant variant chimeric poxvirus consisting of the chimeric poxvirus of claim 56 that has been modified by altering one or more poxviral gene(s) and further comprises one or more heterologous nucleic acid(s) of interest inserted in its genome.

78. A composition comprising a pharmaceutically acceptable vehicle and:
(i) the chimeric poxvirus according to claim 56,
(ii) a variant chimeric poxvirus consisting of the chimeric poxvirus of claim 56 that has been modified by altering one or more poxviral gene(s),
(iii) a recombinant chimeric poxvirus consisting of the chimeric poxvirus of claim 56 further comprising one or more heterologous nucleic acid(s) of interest inserted in its genome; or
(iv) a recombinant variant chimeric poxvirus consisting of the chimeric poxvirus of claim 56 that has been modified by altering one or more poxviral gene(s) and further comprises one or more heterologous nucleic acid(s) of interest inserted in its genome.

79. The composition of claim 78, wherein:
(i) the composition comprises a dose of chimeric poxvirus, variant chimeric poxvirus, recombinant chimeric poxvirus, or recombinant variant chimeric poxvirus comprised between 10⁵ and 5×10⁹ PFU;
(ii) the chimeric poxvirus, variant chimeric poxvirus, recombinant chimeric poxvirus, or recombinant variant chimeric poxvirus is formulated for parenteral route administration; or
(iii) both (i) and (ii).

80. A method for treating a proliferative disease in a subject in need thereof comprising the administration to the subject of:
(i) the chimeric poxvirus according to claim 56,
(ii) a v ariant chimeric poxvirus consisting of the chimeric poxvirus of claim 56 that has been modified by altering one or more poxviral gene(s),
(iii) a recombinant chimeric poxvirus consisting of the chimeric poxvirus of claim 56 further comprising one or more heterologous nucleic acid(s) of interest inserted in its genome;
(iv) a recombinant variant chimeric poxvirus consisting of the chimeric poxvirus of claim 56 that has been modified by altering one or more poxviral gene(s) and further comprises one or more heterologous nucleic acid(s) of interest inserted in its genome; or
(v) a composition comprising a pharmaceutically acceptable vehicle and:
(a) chimeric poxvirus according to claim 56,
(b) a variant chimeric poxvirus consisting of the chimeric poxvirus of claim 56 that has been modified by altering one or more poxviral gene(s),
(c) a recombinant chimeric poxvirus consisting of the chimeric poxvirus of claim 56 further comprising one or more heterologous nucleic acid(s) of interest inserted in its genome; or
(d) a recombinant variant chimeric poxvirus consisting of the chimeric poxvirus of claim 56 that has been modified by altering one or more poxviral gene(s) and further comprises one or more heterologous nucleic acid(s) of interest inserted in its genome.

81. The method of claim 80, wherein the proliferative disease is selected from cancers.

82. The method of claim 81, wherein the cancer is:
(a) selected from lung cancer, renal cancer, bladder cancer, prostate cancer, breast cancer, colorectal cancer, hepatic cancer, gastric cancer, pancreatic cancer, melanoma, ovarian cancer, and glioblastoma;
(b) refractory or resistant to at least one oncolytic virus-based therapy; or
(c) both (a) and (b).

83. The method of claim 81, further comprising the administration of one or more substances effective in anticancer therapy.

The application's sequence listing, which the Patent Office published only in electronic form, follows.

SEQUENCE LISTING (12 sequences)

SEQ ID NO: 1 - DNA, 185577 bp, synthetic construct
  source 1..185577: mol_type = other DNA
agataaaatagaaactggagaaatcaaaacattttcatccgtgtgttttaagattagttctttaaagatatccatggtatagaccaaacaataacgataacgatatatatcataaataaataatgttaaatttcagtttatgtttgtaccccgtattcatacttaacaaattggtattacataccattaataatgcaagcataaaaaatcgttagtagatgtttctaaatataggttccgtaagcaaagaatataagaatgaagggtaatgataaaatcaatcgttatctaaaatgatcatactcatttattttattctattatattaacacatacatttttaacagcaacacattcaatattgtattgttatttttatattatttacacaattaacaatatattattagtttatattactgaattaataatataaaattcccaatcttgttataaacacacactgagaaacagcataaacacagaatccatcaaaaatgttgataaattatctgatgttgttgttcgctgctatgataatcagatcattcgccgatagtggtaacgctatcgaaacgacattgccagaaattacaaacgctacaacagatattccagctatcagattatgcggtccagagggagatggatattgtttacacggtgactgtatccacgctagagatatcgacggtatgtattgtagatgctctcatggttatacaggcattagatgtcagcatgtagtattagtagactatcaacgttcagaaaaaccaaacactacaacgtcatatatcccatctcccggtattgtgcttgtattagtaggcattattatgtgttgtctattatctgtttataggttcactcgacgaactaaactacctatacaagatatggttgtgccataatttttataaattttttttatgagtatttttacaaaaatgtataaagtgtatgtcttatgtatatttataaaaatgctaaatatgcgatgtatctatgttatttgtatttatctaaacaatacctctacctctagatattatacaaaaattttttatttcagcatattaaagtaaaatctagttaccttgaaaatgaatacagtgggtggttccgtatcaccagtaagaacataatagtcgaatacagtatccgattgagattttgcatacaatactagtctagaaagaaatttgtaatcatcttctgtgacgggagtccatatatctgtatcatcgtctagtttatcagtgtcccatgctatatttctgttatcatcattagttaatgaaaataactctcgtgcttcagaaaagtcaaatattgtatccatacatacatctccaaaactatcgcttatacgtttatctttaacgatacctatacctagatggttatttactaacagacattttccagatctattgactataactcctatagtttccacatcaaccaagtaatgatcatctattgttatataacaataacataactcttttccgtttttatcagtatgtatatctatattaacgtcgtcgttgtagtgaatagtagttattgatctattatatgaaacggatatgtctagaacagcaattgtcttacgtccagttaacactttcgttgatttaaagtctagagtctttgcaaacataatatccttatccgactttatatttcctgtagggtggtataattttattttgcctccacatatcggtgtttccaaatatattactagacaatattccatatagttattagttaagggtacccaattagaacacgtacgcttattatcatcatttggatcgtatttcataaaagttattgtactatcgatgtcaacacattctacattttttaatcgtctatatagtatttttctgatattttctataatatcagaattgtcttccatcggaagttgtatactatcggaatcagttacatgtttaaataattctctgatgtcattccttatacaatcaaattcattattaaacagtttaatagtctgtagacctttatcgtcgtaaatatccattgtcttattagttacgcttatttttatgtgttttacgttgctttattatattttataagaatgattgtttgacgaatcacgagaactattaagacacattattaggtatatattataaaaaagtttttgattacgatgttataagaggaaagaggacacattaacatcatacatcaattaactacattcttataacatcgtaatcaaaagaattgcaattttgatgtataacaactgtcaatgggttatggaattgtatattacatattatacggtatgttggtaacgacaaataccgatcggtaattgtctgccggtgtaatagaattatatatatctatctattacaccggccttgtatacataataataagttgtggtagtatgatctccatatttataatttaggactttgtattcagtatttttggaatcataaaaaataaaaaaaagttttactaatttaaaatttaaaaagtatttacatttttttcactgtttagtcgcggatatggaattcgatcctgccaaaatcaatacatcatctatagatcatgtaacaatattacaatacatagatgaaccaaatgatataagactaacagtatgcattatccgaaatattaataacattacatattatatcaatatcacaaaaataaatacacatttggctaatcaatttcgggcttggaaaaaacgtatcgccggaagggactatatgactaacttatctagagatacaggaatacaacaatcaaaacttactgaaactatacgtaactgtcaaaaaaatagaaacatatatggtctatatatacactacaatttagttattaatgtggttattgattggataaccgatgtgattgttcaatcaatattaagagggttggtaaattggtacatagctaataatacctatactccaaatacacccaataatacaacaaccatttctgagttggatatcatcaaaatactggataaatacgaggacgtgtatagagtaagtaaagaaaaagaatgtggaatttgctatgaagttgtttactcaaaacgattagaaaacgatagatactttggtttattggattcgtgtactcatatattttgcataacatgcatcaatatatggcataaaacacgaagagaaaccggtgcgtcggataattgtcctatatgtcgtacccgttttagaaacataacaatgagcaagttctataagctagttaactaataaataaaaagtttaatttgttgacgacgtatgtcgttattttttctcgtataaaagattaatttgattctaatataatctttagtattggataaatatcaattcaaattaattccattagattatatcataaataaaaatagtagcacgcactacttcagccaaatattcttttttgaaacgccatctatcgtagtgaggacacaagtgaacctataatgagcaaatttattagtatcggttacatgaaggactttacgtagagtggtgattccactatctgtggtacgaacggtttcatcttctttgatgccatcacccagatgttctataaacttggtatcctcgtccgatttcatatcctttgccaaccaatacatatagctaaactcaggcatatgttccacacatcctgaacaatgaaattctccagaagatgttacaatgtctagatttggacatttggtttcaaccgcgttaacatatgagtgaacacacccatacatgaaagcgatgagaaataggattttcatcttgccaaaatatcactagaaaaaatttatttatcaattttaaaggtataaaaaatacttattgttgctcgaatattttgtatttgatggtatacggaagattagaaatgtaggtattatcatcaactgattctatggttttatgtattctatcatgtttcactattgcgttggaaataatatcatatgcttccacatatattttattttgttttaactcataatactcacgtaattctggattattggcatatctgtgaataattttagctccatgatcagtaaatattaatgagaacatagtattaccacctaccattatttttttcatttcgttcaattcttgattgcaaagatctatataatcattatagcgttgacttatggactctggaatcttagacgatgtacaggcatctataatcatggcatatttaatacattgttttatagcatagtcgttatctacgatgttagatatttctctcaatgaatcaatcacacaatctaatgtaggtttatgacataatagcattttcagcagttcaatgtttctagattcgttgatggcaatggctatacatgtatatccgttatttgatctaatgttgacatctgaaccggattctagcagtaaagatactagagattgtttattatatctaacagccttgtgaagaagtgtttctcctcgtttgtcaatcatgttaatgtctttaagataaggtaggcaaatgtttatagtactaagaattgggcaagcataagacatgtcacaaagaccctttttgtatgtataagtgtagaaattataacatccatagttggatttacataggtgtccaatcgggatctctccatcatcgagataattgatggcatctcccttccttttttagtagatatttcatcgtgtaagaatcaatattaatatttctaaagtatccgtgtatagcctctttatttaccacagctccatattccaacatgcattccactaaagggatatcgatatcgccgaatgtcatatactcaattagtatatgttggaggacatccgagttcattgttttcaatatcaaagagatggtttccttatcatttctccatagtggtacaatactacacattatttcgtgcggctttccattctccaaaaacaatttgaccaaatctacatctttattgtatctataatcactatttagataatcagccataattcctcgagtgcaacatgttagatcgtctatatatgaataagcagtgttatctattcctttcattaacaatttaacgatgtctatatctatatgagatgacttaatataatattgaagagctgtacaatagtttttatctatagaagacggcttgattccgtgattaattagacatttaacaacttccggacgcacatatgctctcgtatccgactttgaatacagatgcaatacggtaccgcaatttcgtagttgataatcatcatacgcgtatcagtactcgtcctcataaagaacactgcagccattttctatgaacaaatcaataattttaggaacaggatcattgtcattacataattttctataactgaacgatggttttcacatttaacactcaagtcaaatccatgttctaccaacacctttatcaagtcaacgtctacatttttggatttcatatagctgaatatattaaagtcatttatgttgctaaatccagtggcttctagtagagccatcgctatatcctttaactttaacatgtctactatttgtgtattcttctaatggggtagctgtctccaatttttgcgtaatggattagtgccactgtctagtagtagtttgacgacctcaacattattacaatgctcattaaaaaggtatgcgtgtaaagcattattcttgaattggttcctggtatcattaggatctctgtctctcaacatctgtttaagttcatcgagagccacctcctcattttccaaatagtcaaacattttgactgaatgagctactgtgaactctatacacccacacaactaatgtcattaaatatcatgtcaaaaacttgtacaattattaataaaaataatttagtgtttaaattttaccagttccagattttacacctccgttaaccccactggacgatcctcctccccacattccaccgccaccagatgtataagttttagatcctttattactaccatcatgtccatggataaagacactccacatgccgccactactaccccctttagaagacatattaataagacttaagagttaagacaagtttaacaataaaattaatcacgagtaccctactaccaacctacactattatatgattatagtttctatttttacagtaccttaactaaagtctctagtcacaagagcaatactaccaacctacactattatatgattatagtttctatttttataggaacgcgtacgagaaaatcaaatgtctaatttctaacggtagtgttgataaacgattatcgtcaatggatacctcctctatcatgtcgtctattttcttactttgttctattaacttattagcattatatattatttgattataaaacttatattgcttattagcccaatctgtaaatatcggattattaacatatcgtttctttgtaggtttatttaacttgtacatcactgtaagcatgtccgtaccatttattttaatttgacgcatatccgcaatttctttttcgcagtcggttataaattctatatatgatggatacatgctacatgtgtacttataatcgactaatatgaagtacttgatacatattttcagtaacgatttattattaccacctatgaataagtacctgtgatcgtctaggtaatcaactgttttcttaatacattcgatggttggtaatttactcagaataatttccaatatcttaatatataattctgctatttctggaatatatttatctgccagtataacacaaatagtaatacatgtaaacccatattttgttattatattaatgtctgtgccattatctattaaccattctactaggctgacactatgcgacttaatacaatgataaagtatactacatccatgtttatctattttgtttatatcatcaatatacggcttacaaagttttagtatcgataacacatccaactcacgcatagagaaggtagggaataatggcataatatttattaggttatcatcattgtcattatctacaactaagtttccattttttaaaatatactcgacaactttaggatctctattgccaaatttttgaaaatatttatttatatgcttaaatctatataatgtagctccttcatcaatcatacatttaataacattgatgtatactgtatgataagatacatattctaacaatagatcttgtatagaatctgtatatcttttaagaattgtggatattaggatattattacgtaaactattacacaattctaaaatataaaacgtatcacggtcgaataatagttgatcaactatataattatcgattttgtgatttttcttcctaaactgtttacgtaaatagttagatagaatattcattagttcatgaccactatagttactatcgaataacgcgtcaaatatttcccgtttaatatcgcatttgtcaagataataatagagtgtggtatgttcacgataagtataataacgcatctctttttcgtgtgaaattaaatagtttatcacgtccaaagatgtagcataaccatcttgtgacctagtaataatataataatagagaactgttttacccattctatcatcataatcagtggtgtagtcgtaatcgtaatcgtctaattcatcatcccaattataatattcaccagcacgtctaatctgttctattttgatcttgtatccatactgtatgttgctacatgtaggtattcctttatccaataatagtttaaacacatctacattgggatttgatgttgtagcgtatttctctacaatattaataccatttttgatactatttatttctatacctttcgaaattagtaatttcaataagtctatatcgatgttatcagaacatagatattcgaatatatcaaaatcattgatatttttatagtcgactgacgacaataacaaaatcacaacatcgtttttgatattattatttttcttggtaacgtatgcctttaatggagtttcaccatcatactcatataatggatttgcaccactttctatcaatgattgtgcactgctggcatcgatgttaaatgttttacaactatcatagagtatcttatcgttaaccatgattggttgttgatgctatcgcattttttggtttctttcatttcagttatgtatggatttagcacgtttgggaagcatgagctcatatgatttcagtactgtagtgtcagtactattagtttcgatcagatcaatgtctagatctatagaatcaaaacacgataggtcagaagataatgaatatctgtacgcttctttttgtactgtaacttctcgttttgttagatgtttgcatcgtgctttaacatcaatggtacaaattttatcctcgctttgtgtatcatattcgtccctactataaaattgtatattcagattatcatgcgatgtgtatacgctaacggtatcaataaacggagcacaccatttagtcataacagtaatccaaaattttttaaagtatatcttaacgaaagaagttgtgtcattgttaggatttggtaaatcattgtctacggtgtatggtactagatcctcataagtgtatatatctagagtaatgtttaatttatcaaatggttgataatatggatcctcatgacaatttccgaagatggaaatgagatatagacacgcaataaatctaattgcggacatggttactccttaaaaaaatacgaataatcaccttggctatttagtaagtgtcatttaacactatactcatattaatccatggactcataatctctatacgggattaacggatgttctatatacggggatgagtagttctcttctttaactttatactttttactaatcatatttagactgatgtatgggtaatagtgtttgaagagctcgttctcatcatcagaataaatcaatatctctgtttttttgttatacagatgtattacagcctcatatattacgtaatagaacgtgtcatctaccttattaactttcaccgcatagttgtttgcaaatacggttaatcctttgacctcgtcgatttccgaccaatctgggcgtataatgaatctaaactttaatttcttgtaatcattcgaaataatttttagtttgcatccgtagttatcccctttatgtaactgtaaatttctcaacgcgatatctccattaataatgatgtcgaattcgtgctgtatacccatactgaatggatgaacgaataccgacggcgttaatagtaatttactttttcatctttacatattgggtactagttttactatcataagtttataaattccacaagctactatggaataagccaaccatcttagtataccacacatgtcttaaagtttattaattaattacatgttgttttatatatcgctacgaatttaaacagagaaatcagtttaggaaaaaaaattatctatctacatcatcacgtctctgtattctacgatagagtgctactttaagatgcgacatatccgtgtcatcaaaaatatactccattaaaatgattattccggcagcgaacttgatattggatatatcacaacctttgttaatatctacgacaatagacagcagtcccatggttccataaacagtgagtttatctttctttgaagagatattttgtagagatcttataaaactgtcgaatgacatcgcatttatatctttagctaaatcgtatatgttaccatcgtaatatctaaccgcgtctatcttaaacgtttccatcgctttaaagacgtttccgatagatggtctcatttcatcagtcatactgagccaacaaatataatcgtgtataacatctttgatagaatcagactctaaagaaaacgaatcggctttattatacgcattcatgataaacttaatgaaaaatgtttttcgttggatgaatagtatgtcttaataattgttattatttcattaattaatatttagtaacgagtacactctataaaaacgagaatgacataactaatcataactagttatcaaagtgtctaggacgcgtaattttcatatggtatagatcctgtaagcattgtctgtattctggagctattttctttatcgcattagtaagttcagaatatgttataaatttaaatcgaataacgaacatgactttagtaaagtcgtctatattaactcttttattttctagccatcgtaataccatgtttaagatagtatattctctagttactacgatctcatcgttgtctagaatatcacatactgaatctacatccaattttagaaattggtctgtgttacatatctcttctatattattgttgatgtattgtcgtagaaaactattacgtagaccattttctttataaaacgaatatatagtactccaattatctttaccgatatatttgcacacataatccattctctcaatcactacatctttaagattttcgttgttaagatatttggctaaactatataattctattagatcatcaacagaatcagtatatatttttctagatccaaagacgaactctttggcgtcctctataatattcccagaaaagatattttcgtgttttagtttatcgagatctgatctgttcatatacgccatgattgtacggtacgttatgataaccgcataaaataaaaatccattttcatttttaaccaatactattcataattgagattgatgtaatactttgttactttgaacgtaaagacagtacacggatccgtatctccaacaagcacgtagtaatcaaatttggtgttgttaaacttcgcaatattcatcaatttagatagaaacttatactcatcatctgttttaggaatccatgtattattaccactttccattatcccaggctatgtttcgtccatcatcattgcgtagagtaaataattcttttgtattcggtagttcaaatatataatccatgcatagatcggtaaagctattgtagatgtgatttttcctaaatctaatataaaactcgtttactagcaaacactttcctgatttatcgaccaagacacatatggtttctaaatctatcaagtggtggggatccatagttatgacgcagtaacatatattattacattcttgactgtcgctaatatctatatatttattgttatcgtattggattctgcatatagaacacataaccaatttatagtcgcgctttacattctcaaatctacagttaagagatttagaaaacattatatcctcggatgatgttatcactgtttctggagtaggatatattaaagtctttacagatttcgtccgattcaaataaattactaaataatatcccacattatcatctgttagagtagtatcattaaatctattatattttatgaaaaatatatcacttgctcacctctatatttcgtacatttttaaactgtttatataatatctctctgatatatttattgtgtcggtagatgataccgttacatttgaattaatggtgttccattttacaacttttaacaagttgaccaattcatttttaatagtatcaaacgctccatgattaaatattttaatagtatccattttatatcactacggacacaaagtagctgacataaaccattgtataatttttatgttttatgtttattagcgtacacattttggaagttccggctgccatgtatttcctggagagcaagtagatgatgaggaaccagatagtttatatccgtacttgcacttaaagtctacattgtcgttgtatgagtatgatcttttaaacccgctagacaagtatccgtttgatattgtaggatgtggacatttaacaatctgacacgtgggtggatcggaccattctcctcctgaacacaggacaccagagttaccaatcaacgaatatccactattgcaactataagttacaacgctcccatcggtataaaaatcctcgtatccgttatgtcttccgttggatatagatggaggggattggcatttaacagattcacaaataggtgcctcgggattccataccatagatccagtagatcctaattcacaatacgatttagattcaccgatcaaatgatatccgctattacaagagtacgttatactagagccaaagtctactccaccaatatcaagttggccattatcgatatctcgaggcgatgggcatctccgtttaatacattgattaaagagtgtccatccagtacctgtacatttagcatatataggtcccattttttgctttctgtatccaggtagacatagatattctatagtgtctcctatgttgtaattagcattagcatcagtctccacactattcttaaatttcatattaatgggtcgtgacggaatagtacagcatgatagaacgcatcctattcccaacaatgtcaggaacgtcacgctctccaccttcatatttatttatccgtaaaaatgttatcctggacatcgtacaaataataaaaaagcccatatatgtttgctattgtagaaattgtttttcacagttgctcaaaaacgatggcagtgacttatgagtttcatctttagtaaacatatcataatattcgatattacgagttgacatatcgaacaaattccaagtatttgattttggataatattcgtattttgcatctgctataattaagatataatcaccgcaagaacacacgaacatctttcctacatggttaaagtacatgtataattctatccatttgtcttccttaactatatatttgtatagataattacgagtctcataagtaattccagtaattgcatagatgtcaccatcgtactctacagcataaactatactatgatgtctaggcatgggagacttttttatccaacgatttttagtgaaacattctacatcgtttaatactacatatttttcatacgtggtataaactccacccattacatatatatcatcgtttacgaataccgacgcgcctgaatatctaggagtaattaagtttggaagtcttatccatttcgaagtgccgtgtttcaaatattctgccacacccgttgaaatagaaaattctaatcctcctattacatataactttccatcgttaacacaagtactaacttctgattttaacgacgacatattagtaaccgttttccattttttcgtttcaagatctacccgcgatacggaataaacatgtctattgttaatcatgccgccaataatgtatagacaattatgtaaaacatttgcattatagaattgtctatctgtattaccgactatcgtccaatattctgttctaggagagtaatgggttattgtggatatataatcagagtttttaatgactactatattatgttttataccattttgtgtcactggctttgtagatttggatatagttaatcccaacaatgatatagcattgcgcatagtattagtcataaacttgggatgtaaaatgttgatgatatctacatcgtttggatttttatgtatccactttaataatatcatagctgtaacatcctcatgatttacgttaacgtcttcgtgggataagatagttgtcagttcatcctttgataattttccaaattctggatcggatgtcactgcagtaatattgttgattatttctaacatcgacgcattatatagttttttaattccatattgtttagaaaagttaaacatccttatacaatttgtggaattaatattatgaatcatagtttttacacatatatctactacaggcgtaacatcaattattacggcagcaactagtatcatttctacattgtttatggtgatgtttatcttcttccagcgcatatagtctaatagcgattcaaacgcgtgatagtttataccattcaatataatcacttcatcatttatatggtgctcctgaatgcgtttaaaaaaattatacggagacgccgtaataatttccttattcacttgtataatttccccattgatagaaaatatcacgctttccattcttgaagtactataagtaattatagtataatgtaaacgtttatatattcaatatttttataaaaatcattttgacattaattcctttttaaatttccgtctatcatctatagaaacatgttctatgaatttataaaatgcttttacgtgtcctatcgtaggcgatagaaccgctaaaaagcctatcgaatttctacaaaagaatctgttatatggtatagggagagtataaaacattaaatgtccgtacttattaaagtattcagtagccaatcctaactctttcgaatacttattaatggctcttattctgtacgaatctatttttttgaacaacggacctagtggtatatcttgttctatgtatctaaaataatgtcttacgagatccgttagtttaatatccgcagtcatcttgtctagaatggcaaatctaactgcgggtttaggctttagtttagtttctatatctacatctatgtctttatccaacactaaaaatataatagctaatattttattacaatcatccggatattcttctacgatctcactaactaatgtttctttggttatactagtatagtcacgatcagacaaataaagaaaatcagatgatcgatgaataatacatttaaattcatcatctgtaagatttttgagatgtctcattaaaatattattagggtcagtactcattatcatatattggcagcagctattacttattttatttttctgtattttattatttttcaccatatagatcaatcattagatcatcaaaatacttttcaatcatcctaaagagtatggcgaacgaatcttcccatctaatttctgaacgttcaccaatgtctctagccactttggcactaatagcgatcattcgcttagcatcttctatattattaactggttgattcaatctatctagcaatggaccgtcagacagtgtcattctcatgttcttaatcaatgcacatacatcgccgtcatctaccaattcatccaacgacataagatttttaaaatcatcattataataggatggatcgccatcatttctccaaagaatatatctaataagtagagtcctcatgtttagtaatttaactattttagttaataactattttttatgttaaatcaagtagcaccactatgttaatacttattcatattttagtttttaggattgataatcaacataaaaattaatacatcatcaattttggaaatactttgtttccacgtagtcaatgaaacatttgagctcatcgtataggacgttctcgaataggacgtaattatatactggtttatatttgttcaagatagatacaaatccgataacttttttgacgaagtctacgggatccactttaaaagtgtcataccgggttctttttattcttttaaacagatcaatggtgtgatgttgattaggtcttttacgaatttgatacagaatagcgtttacgtatccaccatagtgatcaatcgccatttgttcgtatgtcataaattctttaattatatgacatgttgtattatttagttcatccttgttcatcgttaggaatctatccaaaatggcaattatactagaactataactgcgtcgttgtatacacatatcgatgtgtctgtttatacaatcaatgatattaggatccatgctactaccttcgggtaaaaatgtagcatcatatacctctagtacgttaggttcatcgttacccattgtagaggacgtcataatcgaattctaaaaaaatatattatttttatgttattttgttaaaaataatcatcgaatacttcgtaagatactccttcatgaacataatcagttacaaaacgtttatatgaagtaaagtatctacgatttttacaaaagtcaggatgcataagtacaaagtacgcgataaacggaataataatagatttatctagtctatctttttctatagctttcatagttagatacatggtctcagaagtcggattatgtaacatcagcttcgataaaatgattgggttatttattcttacacattcgctcatacatgtatgaccgttaactacagagtctacactaaaatgattgaacaatagatagtctaccattgcttcgtattcagatagtacagcgtagtacatggcatcttcacaaattatatcattgtctaatagatatttgacgcatcttatggatcccacttcaacagccatcttaaaatcagtagaatcatattgttttcctttatcattaataatttctagaacatcgtctctatcataaaagatacaaatattaactatttgatccgtaataacattgctagtagatagcaatttattaataagttgcgctggggtcaatgtcttaacaagaagggtaagaggactatctccgaatttgttttgtttattaacatccgttgatggaagtaaaagatttatgatgtctacattcttgactggtttagagcatacaatatggagaggtgtatttccatcatgatctggttttgagggactaattcctagtttcatcatccatgagattgtagaagcttttggattgtctgacataagatgtctatgaatatgatttttgccaaatttatccactatcctggcttcgaatccgatggacattatttttttaaacactctttctgaaggatctgtacacgccaacaacggaccacatccttcttcatcaaccgagttgttaatcttggctccataccgcaccaataaatttattctctctatgacttcatcatctgttcccgagagataatatagaggtgttttatgctgtttatcacatgcgttcggatctgcaccgtgtgccaacagcgtcgcaactattctattattgttaattttagaagctatatgtaatggataatttccatcatcgtccgtctcatttggcgagtatcctatatgaagaagttcttcaacaaatcgttcatctagtcctttaattccacaatacgcatgtagaatgtgataatgtccagaaggttcgattgcttgcagcatattcctaaatacatctaaatttttactattatacttggcataaagagatagataatactctgctgacataatgttgtctattgtagtataaaaattaatatttctatttctatttctatttctatatatttgcgacaatttactctctataacaaatatcataacttacttcttttatgtcaagaaagcactggtttagttcatccataaatgtcacgccataactaccgcgcataccatactcagaattacgataaagatatttatccttggggtgtaggtaatggggattaatctttgttggatcagtctctaagttaacacacgtcacacaggatccatttatagttatatcacatgatgatttatgatgaattgattccggaagatcactatcgtattttgtggttccacaattcatttccatacatgttattgtcacactaatattatgatgaactttatctagccgctgagtggtaaacaacagaacagatagtttattatctttaccaactccctcagccgccgctacaaatctctgatccgtatccatgatggtcatgtttatttctagtccgtatccagtcaacactatgttagcatttctgtctatatagctttcactcatatgacactcacccataatagtagaattaatgtcataatttacaccaatagtgagttcggcggcaaagtaccaataccggtaatcttgtcgaggaggacatatagtgttcttgtattcggcagaatacccgagagatacgacacaaaggagtaagactaatttgtaaaccatcttacacaatagtacgatgcaattagcaataagacaatggaaatctatctataacatataattattctatcaattttaccaattagttagtatagtgtttaacaaaaatgttggagaatctaattagtttttccgcgcataattgacgtacatgagtctgagttccttgtttttactaattatttcatccaatttattattcttgacaatatcgaggtcttttgtataggagtcagacttgtattcaacatgcttttctataatcatcttagctatttcggcatcatccaatagtacattttccagattaacagaatagatattaatgtcgtatttgaacagagcctgtagcatttcaaggtctttgttatctatagccaatttgatgtccggaatgaagagaagggaattgttagtgttggtagattccatatagtcaagcaagagaatcatcatatccacgtttccattttttatggagtcgtgaatgcaactgtatagaatagccaggtcaaaagtagatggtatctctgaaagaaagtatgatacaatacttacatcattaagcatgacggcatgataaaatgaagttttccatccagttttcccatagaacatcagtctccaatttttcttaacaaacagttttaccgtttgcatgttgccactatcaaccgcgtaatacaatgcggtgtttcctttgtcatcaaattgtgaatcatccattccactgaatagcaaaatctttgctattttggtatcttctaatgtggctgcctgatgtaatggaaattcattctctagaagatttttcaatgctccagcgttcaacaacgtacatactagacgcacgttattatcggctattgcataatacaaggcactatgtccatggacatccgccttaaatgcatctttgctagagagaaagcttttcagctgcttggacttccaagtattaattcgtgacagatccatgtctgaaacgagacgctaattagtgtataatttttcattttttataattttgtcatactgctccagaattaataatatctctaatagatctgattagtagatatatggctatcgcaaaacaacatatacacatttaataaaaataatattcattaaggagattcagattccaccgtacccatcaatataaataaaataatgattccttacaccgtacccataatattaataattatccttccaccgtaccaatcaatataaataaaataatgattccttacaccgtacccataaacaatattaaggagattccaccttacccataaacaatataaatccagtaatatcatgtctaatgatgaacacaaatggtgtattaaattccagttgttcaggagatgatctagccgtagctaccatgatagtagatgcctctgctacagttccttgttcgtcgacgtctatctttgcattctgaaacattttatagatatataatgggttcctagtcatatgtttaaacgacgccttatctggattaaacatactaggagccatcatttcggctatcgacttaatatccctcttattttcgatagaaaatctagggagtttaagattgtacactttattccctaattgagatgaccaatagtctaattttgcagccgtgatagaatctgtgaaatgagtcatattatcacctattgccaggtacatactaatattagcatccttatacggaaggcgcaccatatcatattcttcatcgtcgacggtgattgtatttccttgcaatttagtaactacgttcatcatgggaaccgttttcgtaccgtacttattagtaaaactagcattgcgtgttttagtgatatcaaacggatattgccacgtacctttaaaatatatagtattaatgattgcccatagagtattattgtcgagcatagtagaatctactacattagacataccggatctacgttctactatagaattaattttattaaccgcatctcgtctaaagtttaatctatataggccgaatctatgatattgttgataataagacggtttaatacatacagtactatcgacgaaactttgataagttagatcagtgtacgtatatttagatgttttcagcttagctaatcccgatattaattctgtaaatgctggacccagatctctttttctcaaatccatagtcttcaataattctactctagtattacctgatgcaggcaatagcgacataaacatagaaaacgaatagccaaacggcgagaagacaatattatcatcctcgtccccatcctgaatatttttatacgctaatataccggcattggtaaatccttgcagacgatatgcggacgccgtacacgctaacgatagtatcaataacgcaatcatgattttatggtattaataatttaccttatttttatgtttagtataaaaaattattgatgtctgcacatccttttgtaattgacatctatatatccttttgtataatcaactctaatcactttaacttttacttttttccctacaagtttatccctatatttaaaatatctatccatatgcatctgaacactctctgccaagatagctgcagagtgaggatagtcaaaaagatcaatatatagagcataatcattctcgtatactctgccctttattacatcgcccgcattgggcaacgaataacaaaatgcgagcatctcgttaacgggctcgtaaattgggataaaaattatgtttttattgttttatatctattttattccagatagtattcaggaatttctttttccggttgtatctcgtcgttgtatatatcatttgtgcattgtttcatattttttaatagtctacatcttttagtaggactagtatcgtacaattcatagctgtattttgaattccaatcacgcataaaaatatcttccaattgttgacgaagacctaatccatcatccggtgtaatattaatagatgctccacatgtatccgtaaagtaattccctgtccaatttgaggttcctatatacgccgttttatctgttaccatatatttggcatggtttaccctagaatatggaattggaggatcggcatccggtacaataaacagttttacttctatatctatgtttttagattttagcatagcgatagatcttaaaaagtttctcataataaacgaagatcgttgccagcaactaatcaatagcttaactgacacttgtctgtctatagcggctcttcttaattcatcttctatatacggccaaaacaaaattttacccgccttcgaataaataatagggataaagttcataacggatacataaacgaatttactcgcatttccgatacatgacaataaagcggttaaatcattagttctttccatagtacatagttgttgtggcgcagaagcaataaatacagaatgtggaacaccgcttacgttcatactaagaggatgatctgtattataatacgcaggataaaagtttttccaattatatggtagattgttaactccaagataccagtatacctcaaaaatttgagtgagatccgctgccaagttactattattgaagatagcaatacccaattccttgacctgagttagtgatctccaatccatgttagcgcttcctaaataaatatgtgtattatcggatatccaaaattttgtatgaagaactcctcctaggatatttgtaatatctatgtatcttacttcaactccggccatttgtagcgtttcaacatcctttaatggtttgttggatttattgacggctactctaacgcgtactcctcttttgggtaattgtataatctcatttaatattatcgtgccgaaattcgtacccacttcatccgataaactccaataaaaagatgatatatctagtgtttttgtggtattggatagaatttccctccacacgttaaatgtagacaaatatactttatcaaattgcatacctataggaatagtctctgtaatcactgcgattgttttatccggattcattttatttgttaaaaaaaataatatcacttcactctattaaaaatccaagtttctatttctttcataactgattttttaacttcgtccgtttccttatgaagatgatgtttggcaccttcataaatttttatttctctattacaatttgcatgttgcatgaaataatatgcacctgaaacatcactaatctcattgtttgttccctggagtatgagactaggggtgttaatcttgggaattatttttctaaccttgttggtagccttcaagacctgactagcaaatccagccttaattttttcatgattgaccaatggatcgtattggtatttataaacttcatccatatctctagatactgattctgggcatagctttccgactggtgcatttggtgtgaagcttcccataagtttggcagctagcatatttagtcttggaacagcttctgtattaactagaggagacattagaatcattgctgtaaataagtctggattctcataagcggccagtatagaaattgttgctcccatggaatgacccaataagaagactggaactcctggataagtagatttaatagtcaccacgtgctgtaccacatctctaacatacgtaccaaagtcatctatcatcattttttcaccattacttcttccatgaccaatatgatcatgtgagaatactaaaattcctaacgatgatatattttcagctagttcatcataacgtccagaatgttcaccagctccatgacttatgaatactaatgccttaggatatgtaataggtttccaatatttacaatatatgtaatcattgtccagattgaacatacagtttgcactcatgattcacgttatataactatcaatattaacagttcgtttgatgatcatattatttttatgttttattgataattgtaaaaacatacaattaaatcaatatagaggaaggagacggatactgtcttttgtgagatagtcatggcgactaaatcagattatgaggatgccgttttttactttgtggatgatgatgaactatgtagtcgtgactccatcatcgatctaatagatgaatatatcacgtggagaaatcatgttatagtgtttaacaaagatatcaccagttgtggaagactgtacaaggaattgatgaagttcgatgatgtcgctatacggtactatggaattgataaaattaatgagattgtcgagactatgagcgaaggagaccactacatcaatctcacagaagtccatgatcaggaaagtctattcgctaccataggaatatgtgctaaaatcactgaacattggggatacaaaaagatttcagaatctagattccaatcattgggaaacattacagatctgatgaccgacgataatataaacatcttgatactttttctagaaaaaaaattgaattgatgacatagtgttataacgcgtaattattatgttaatgcattcttattctatatccggtgttaaaaaaaattatcctatcatgtatttgagagtcttatatgtagcaaacatgatagctgtgatgccaataagctttagatattcacgcgtgctagtgttggggatggtattatctggcggtgaaatgtccgttatataatctacaaaacaatcatcgcatatagtatgcgatagtagagtaaacatttttatagtttctactggattcatacatcgtctacccaattcggttatgaatgaaattgtcgccaatcttacacccaaacccttgttatctattagtatagtattaacttcgttatttatgtcataaactgtaaatgattctgtagatgccatatcatacatgatattcatgtccctattataatcattattaactttatcacaatacatgttgataatatctatatatgatctagtttttgttggcaactgtctatacaagtcgtctaaacgttgtttactcatatagtattgaacagccatcattacatggtcccgttccgttgatagataatcgagtatgttagtggacttgtcaaatctatataccatattttctggaagtggatatacatagttgtgatcatcattatcgctagcctcatcttctatatccggtactataccattatctatatccggtactataccattatctatatccggtactataccattatctataccatcatctacatcatcatctacataatctactatattattatacataaacatcgacaacatactattgtccattatctaagtccagttgatccaaacccttgagctcctctatctgtactatctagagattgtacttcctccagttctggataatatatacgttgatagattagctgagctattctatctcccgtatttacattgaacgtacattttccattattaataagaatgactcctatgtttcccctataatcttcgtctattacaccacctcctatatcaatgccttttagtgacagtccagacctaggagctattctaccatagcagaacttaggcatggacatactaatatctgtcttaattaactgtctttctcctggagggatagtataatcgtaagcgctatacaaatcatatccggcagcacccggcgattgcctagtaggagatttagctctgttagtttccttaacaaatctaactcgtgagttaatattcatgttgctcataaaactaatattttatttcaaaattatttaccatcccatatattccatgaataagtgcgattattatacacttctatagtatctatatacgaaccacgataaaatcctcctatcaatagcagtttattatccactatgatcaattctggattatccctcggataaataggatcatctatcagattccatgtattgctgtattcgcaataaaattcagcatttctaccaaccaagaataaccttctaccgaacactaacgcgcatgatttataatgaggataataagtggatggtccaaactgccactgatcatgatcgggtagcaaatattctgtagttgtatccgtttcagaatgtcctcctattacgtatataacattgtttatagatgcgattgctggattacatctaggtttaagaagactcggcatattaacccaagaagtatccccatggaaccaacgctcgacagatgtgggatttggtagacctcctactacgtataatttattgttagcaggtaccccactagcgtacagtctgggactattcatcggaggaattggaatccaattgtttgatacacaatttaacgctatagcatggttatgtatttcattgttcatccatccaccgatgagatatactacttctccaacatgagtacttgtacacatatggaatatatctataatttgatccatattcataggatactctatgaatggatacctgtatgatttgcgtggtcgtttatcacaatgaaatattttggtacagtctagtatccattttacattatttatacctctgggtgaaagataatttgacctgattacatttttgataaggagtagcaaatttcctaatctatttcttcgcttcatataccacttaatgacaaaatcaactacataatcctcatctggaacatttagttcgtcgctttctagaataagtttcatagatagataatcaaaattgtctatgatgtcatcttccagttccaaaaagtgtttggcaataaagtctttagtatgacataagagattggatagtccgtattctatacccatcatgtaacactcgacacaatattcctttctaaaatctcgtaggataaagtttatacaagtgtagatgataaattctacagatgttaatatagaagcacgtaataaattgacgacgttatgactatctatatatacctttccagtatatgagtaaataactatagaagttagactgtgaatgtcaaggtctagacaaaccctcgtaactggatctttatttttcgtgtatttttgacgtaaatgtgtgcgaaagtaaggagataactttttcaatatcgtagaattgactattatattgcctcctatagcctcaataattgttttgaatttcttagtcatagacaatgctaatatattcttacagtacacagtatttacaaatattggcatttatgtttctttaaaagtcaacatctagagaaaaatgattatcttcttgagacataactcccattttttggtattcacccacacgtttttcgaaaaaattagtttttccttccaatgatatattttccatgaaatcaaacggattggtaacattataaatttttttaaatcccaattcagaaatcaatctatccgcgacaaattctatatatgttttcatcatttcacaattcattcctataagtttaactggaagagccgcagtaagaaattcttgttcaatggataccgcatctgttataatagatctaacggtttcttcactcggtggatgcaataaatgtttaaacatcaaacatgcgaaatcgcagtgcagaccctcgtctctactaattagttcgttggaaaacgtgagtccgggcattaggccacgctttttaagccaaaatatggacgcaaatgacccagaaaagaagattccttctactgcggcaaaggcaacaagtctctctccataactggcgctgtcatgtatccacttttgagcccaatcggccttcttttttacacaaggcatcgtttctatggcattaaagagatagtttttttcattactatctttaacataagtatcgatcaaaagactatacatttccgaatgaatgttttcaatggccatctgaaatccgtagaaacatctagcctcggtaatctgcacttctgtacaaaatcgttcagctaaattttcattcactattccgtcactggctgcaaaaaacgccaatacatgttttataaaatgtttttcgttgggtgttagtttattccaatcattgatatctttagatatatctacttcttccactgtccaaaatgatgcctctgcctttttatacatattccagatgtcatgatattggattgggaaaataacaaatctatttggatttggtgcaaggatcggttccataactaaattaacaatagtagtaaattttttttcagttatcatctatatgactgtatttggatcttttatacattgccattgcagctatcactacaataattacaagtattattgatagcattgttattagtactatcataattaaattatctacatccatgggtgctgaataatcgttattatcatcattttgtaattgtgacatcatactagataaatcatttgcgagattgttgttggaaactgacatggaggatgcgttagcattatcgttattattatttaacgcctcccattctgattcacaaatgttacgtgcgttcaacattttatggaaactataattttgtgaaaacaggtaacaagaaaactcttcatcgttcaaatttttaacaatagtaaaccgattaaacgtcgagctaatttctaacgctagcgactctgttggatatggatttccagatatatatcttttcagctcccctacgtatctataatcatctgtaggaaatggaatgtatttccatctatctagtgttcctaatatcatatatggtggtgtagtagaaccattaagtgtgaaagattttatttcgcatcgtattttaacttcgcaataagattttgttagataacgcacactaccattcaaatcaatgatattagcctttacagatatattcatagtagtcgtgactatgactccatcttttagatgcgatactcccttgtatgtaccagaatcttcgtacctcaaactcgatatatttaaacaagttaatgagatattgacgcgttttatgaatgacgatatatatccagaagtttcatcctctgtggctagcgctataaccttatcattataataccaaagagtatgattaatatgtgatacgtcagtgtgggtacaaatatgtacattatcgtctacgtcgtattcgatacatccgcatacacccaacagatataaaatgataaatactctaacaacgttcgtacccatattgatgcggcttaatacatgttttgatttcaatttattgtaaaaaaagaatcggttttatacggttcgatattcttattctcgtctatcatctccacacagtcaaatccgtggttagcatgcacctcatcaaccggtaatagactatcggactcttctatcattataactcgagaatatttaatttgctcattattaatcaagtcaattatcttatttttaacaaatctgagtattttactcattttttataaaaacttttagaaatatacagactctatcgtgtgtctatatcttctttttatatccaatgtatttatgtctgatttttcttcatttatcatatataatggtccaaattctacacgtgcttcgaattcatccagatcattaatgttcttataatcgtaatatccttctcctcccgcttctacatcttccttcttattcttattcttattcttgtcacagaatctaccacaacaggatcccatgacgagcgtcatattaaactaattcattttcaattataatatactgattagtaatgaccattaaataaaaatattcttcataaccggtaagaaagtgaaaagttcacattgaaactatgtcagtcagtagttatacatcatgaaatgatgatatatatattctctattttggcggaggattatatgatataattcgtggataatcattcttaagacacatttcttcattcgtaaatcttttcacgttaaatgagtgtccatattttgcaatttcttcatatgatggcggtgtacgtggacgatgctgctcctgttcttgttgtggtcgccgactgtcgtgtttgcgtttagatccctccattatcgcgattgcgtagatggagtactatttttataccttgtaattaaatttttttattaattaaacgtataaaaacgttccgtatctgtatttaagagccagatttcgtctaatagaacaaatagctacggtaaaaataactagaataatcgctacacccactagaaaccacggatcgtaatacggcaatcggttttcgataataggtggaatgtatattttatttaaggacttaacaattgtctgtaaaccacaatttgcttccgcggatcctgtattaactatctgtaaaagcatatgttggccgggcggagccgaacattctccgatatccaatttctgtatatctataatgttattaacctccgcatacgcattacagttcttttctagcttggataccgcactaggtaaatcatttaggtctattcctatttcctcagcgatagctcttctatccttttccggaagcaatgaaatcacttcaataaatgattcaaccatgagtgtgaaactaagtcgagaattactcatgcatttgttagttattcggagcgcgcaatttttaaactgtcctataacctctcctatatgaatagcacaagtgacattagtagggatagaatgttgagctaatttttgtaaataactatctataaaaagattatacaaagttttaaactctttagtttccgccatttatccagtctgagaaaatgtctctcataataaatttttccaagaaactaattgggtgaagaatggaaacctttaatctatatttatcacagtctgttttggtacacatgatgaattcttccaatgctgtactaaattctatatctttttcgatttctggatatgtttttaataaagtatgaacaaagaaatggaaatcgtaataccagttatgttcaactttgaaattgttttttattttcttgttaatgattccagccacttgggaaaagtcaaagtcgtttaatgcagatttaatacgttcattaaaaacaaactttttatcctttagatgaattattattggttcattggaatcaaaaagtaagatattatcgggtttaagatcagcgtgtaaaaagttgtcgcaacagggtagctcgtaaactttaatgtataacagagacatctgtaaaaagataaactttatatattgtaccaaagatttaaatcctaatttgatagctaactcggtatctactttatctgccgaatacagtgctaagggaaaaattataatgtttcctctttcgtattcgtagttagttctcttttcatgttcgaaaaagtgaaacatgcggttaaaatagtttataacattaatattactgttaataactgccgggtaaaaatgggatagtaatttcacgaatttgatactgtcctttctctcgttaaacgcctttagaaaaactttagaagaatatctcaatgatagttcctggccatccatagtttgtatcaataataacaacatatgaagaacccgtttatacagagtatgtaaaaatgttaatttatagtttaatcccatggcccacgcacacacgattaattttttttcgtctccctttagattattgtacagaaatttgggtactgtgaactccgcagtagtttccatgggactatataattttgtggcctcgaatacaaattttactacatagttatctatcttaaagactataccatatcctcctgtagatatgtgataaaaatcgtcgtttataggataaaatcgtttatccttctgttggaaaaaggatgaattaatgtaatcattctcttctatctttagtagtgtttccctattaaaattcttaaaataatttaacaatctaactgatggagcccaattttggtgtaaatctaattgggacattatattgttaaaatacaaacagtctcctaatataacagtatctgataatctatggggagacatccattgatattcaggggatgaatcattggcaacacccatttattgtacaaaaagccccaatttacaaacgaaagtccaggtttgatagagacaaacaattaactattttgtctctgtttttaacacctccacagtttttaatttctttggtaatgaaattattcactatatcagtatcttctttatctaccagagattttactaacttgataaccttggctgtctcattcaatagggtagtgatatttgtatgtgtgatattgatatctttttgaattgtttcttttagaagtgattctttgatagtgtcagcatacgaattacaataatgcagaaactcagttaacatgcaggaattatagtaagccaattccaattgttgcctgtattgtattagagtgtcaatatgtgcaatggtgtccttgcgtttctctgatagaatgcgagcagcgattttggcgttatcatttgacgatatttctggaatgatgaatcctgtttctactaactttttagtaggacaaagcgaaacaatcaagaagatagcttctcctcctatttgtggaagaaattgaactcctctagatgatctactgacgatagtatctccttgacagatattggaccgaattacagaagtacctggaatgtaaattcctgaaacgccctcattttttaaacagattgttgcagtaaatcccgcactgtgaccaagatagagagctcctttggtgaatccatctctatgtttcagtttaaccaaaaaacagtcagctggtctaaaatttccatctctatctaatacagcatccaacttgatgtcgggaaccataaccggtttaatgttatatgtaacattgagtaaatccttaagttcataatcatcactgtcatcagttatgtacgagccaaacaatgtttctaccggcatagtggatacgaagatgctatccatcagaatgtttccctgattagtgttttctatatagctattcttctttaaacgattttccaaatcagtaactatgttcatttttttaggagtaggacgcctagccagtatggaagaggattttctagatcctctcttcaacatctttgatctcaatggaatgcaaaaccccatggtgtaacaaccaacgataaaaataatattgtttttcactttttataattttaccatctgactcatggattcattaatatctttatacgagctactaatgtacaattctttataactgaactgagatatatacatttgatctatggtttccatgattgagtaaatgaatgctctgcaataactaatggcaaatgtatagaacaacgaaattatactagagttgttaaagttaatattttctatgagctgttccaataaattatttgttgtggctgcgttcaagtcataaatcatcttgatactatccagtaaacagtctttaagttctggaatattatcatcccattgtaaagcccctaattcgactatcgaatatcctgctctgatagcagtttcaatatcgacggacgtcaatactgtaataaaggtggtagtattgtcatcatcgtgataaactacgggaatatggtcgttagtaggtacggtgactttacacaacgcgatatataactttccttttgtaccatttttaacgtagttgggacgtcctgcaggatattgttttgaagaaatgatatcgagaacagatttgatacgatatttgttggattcctgattattcactataatataatctagacagatagatgattcgataaatagagaagatatatcgttggtaggataatacatccccattccagtattctcggatactctattgatgacactagttaagaacatgtcttctattctagaaaatgaaaacatcctacacggactcattaaaacttctagcgctcctgattgtgtctcgaatgcctcaaacaaggatttcaaggatgccatagattctttgaccaatgatttaatattgcgtttagcatctgatttttttattaaatcgaatggtcggctctctgatttactaccccaatgataacaatagtcttgtaaagataagccgcaagaaaatttatacgcatccatccaaataactctagcaccatctgatgatattagtgtattattatagattttccatccacagttattgggccagtatactgttagcaacggtatatcaaatagattactcatgtaacctactagaatgatagttcgtgtactagtcataatatctttaatccaatctaagaaatctaaaattagatcttttacactgttaaagttaacaaaggtattacccgggtacgtggatatcatatatggtattggtccattatcagtaatagctccataaactgatacggcgatggtttttatatgtgtttgatctaacgaggaagaaattcgcgcccacaattcatctctagatatgtatttaatatcgaacggtaacacatcaatctcgggacgcgtatatgtttctaaattcttaatccaaatataatgatgacctatatgccctattatcatactgtcaactatagtatacctagagaacttacgatacatctgtttcctgtaatcgttaaattttacaaatctataacatgctaaaccttttgacgacagccattcattaatttctgatatggaatctgtattctcgataccgtatcgttctaaagccagtgctatatctccctgttcgtgggaacgctttcgtataatatcgatcaatggataatctgaagtttttggagaataatatgactcatgatctatttcgtccataaacaatctacacataggaattggaggcgatgatcttaattttgtgcaatgagtcaatcctataacttctaatcgtgtaatattcatcatcgacataacactatctatgttatcatcgtatattagtataccacgaccttcttcatttcgtgccaaaatgatatacagtcttaaataattacgcaatatctcaatagtttcataattgttagctgttttcatcaaggtttgtatcctgtttaacatgatggcgttctataacgtctctattttctatttttaattttttaaatttttaacgatttactgtggctagatacccaatctctctcaaatatttttttagcctcgcttacaagctgtttatctatactattaaaactgacgaatccgtgattttggtaatgggttccgtcgaaatttgccgaagtgatatgaacatattcgtcgtcgactatcaacaattttgtattattctgaatagtgaaaaccttcacagatagatcattttgaacacacaacgcgtctagacttttggcggttgccatagaatatacgtcgttcttatcccaattaccaactagaagtctgatcttaactcctctattaatggctgcttctataatggagttgtaaatgtcgggccaatagtagctattaccgtctacacgtgtagtgggaactatggccaaatgttcaatatctatactagtcttagccgacttgagtttatcaataactacatcagtgtctagatctctagaatatcccaataggtgttctggagaatcagtaaagaacactccacctataggattcttaatatgatacgcagtgctaactggcagacaacaagccgcagagcataaattcaaccatgaattttttgcgctattaaaggctttaaaagtatcaaatcttctacgaagatctgtggccagcgggggataatcagaatatacacctaacgttttaatcgtatgaatagatcctccagtaaatgacgcatttcctacataacatctttcatcatctgacacccaaaaacaaccgagtagtagccccacattattttttttatctatgttaacagttataaaatttatatccgggcaataactttgtagctctcccagatttcttttccctcgttcatctagcaaaactattattttaacccctttttcagatgcctcttttagtttatcaaaaataagagctcccctagtagtactcataggattacaacaaaaagatgctatgtatatatatttcttggctagagtgataatttcgttaaaacattcaaatgtagtcaaatgatcggatctaaaatccatattttctggtagtgtttctaccagcctacattttgctcccgcaggtactgatgcaaatggccacatttagttaacataaaaacttatacatcctgttctatcaacgattctagaatatcatcggctatatcgctaaaattttcatcaaagtcaacatcacaacctaactcagttaatatattaagaagttccatgatttcatcttcgtctatttccatatccatatccattgtagattgttgactgattatcgagtttaaatcagtattaatacccaattcttcagaatacactcggtgtttcatcgtaaccctctatcagtaacgtatttaagttggtagattttcaattatgtatcaatatagcaacagcagttcttgctcctccttgattctagtatcctcttcattattttcttctacgtacataagcatgtccaatacgtttgacaacatgccgacgatggcggctgccacagatacgaatatgactaaaccgatgaccatttaaaaaccactctctagctttcacttaaacttatagatcattcttttagcacatgtataatataaaaacattattctatttcgaatttaggcttccaaaaatttttcatccgtaaaccgataataatatatatagacttgttaatggtcggaataaacagattaatgcttaaactatcgtcatcaccacgattagagatacaatacttacattctttttgctgtttcgaaactttatcaatacacgttaatacaaacccaggaaggagatattgaaactgaggctgttgaaaatgaaacggtgaatacaatagttcagataatgtaaaatcatgattccgtattctgatagtattagaactgttaatggatgcagatggaacgtatctaggtgtatctattttaacaaagcatcgatttgctaatatacaattatccttttgattaattgttattttattcatattcttaaaaggtttcatatttatcaattcttctacattaacaatttccatttttaatttatgcagccccgcaatactcctcattacgtttcattttttttctagaatatccattttgttcatttcggcacatagattatccaattgagaagtgcatttagtagttttgtatattttaagtttattgacgaatcgtcgaaaattagttatagttaacattttattatttgataccctgatattaatacccctgccgttactattatttataactgatgtaacccatgtaacattagaattaattatcgatagtaatgcatcaacgcttccaaaattgtctattataaactcaccgataatttttttattgcatgttttcatattcattaggattatcaaatctttaatcttcttacgattgtatgcgttgatattacaagacgtcattctaaaagacggaggatctccatcaaatgccagacaatcacgtacaaagtacatggaaataggttttgttctattgcgcatcatagattcatatagaactcccatagaaatactaatttgttttactctataaaatactaatgcatctatttcatcgttatgtataacgtctttccaagtgtcaaattccaaatttttttcattgatagtaccaaattcttctatctctttaactatttgcatagataggtaattacagtggtgtctacaagctgttttttgaaactgaatcgatgcatctagaagcgatgctacgctagtcacaatcaccgctttcatatttagaatatatgtatgtaaaaatatagtagaatttcattttgtttttttctatgctataaatgaattctcattttgcatctgctcatactccgttttatatcaataccaaagaaggaagatatctggttctaaaagccgttaaagtatgcgatgttagaactgtagaatgcgaaggaagtaaagcttcctgtgtactcaaagtagataaaccctcatcacccgcgtgtgagagaagaccttcgtccccgtccagatgcgagagaatgaataaccctggaaaacaagtcccgtttatgagaacggacgtgctacaaaatatgtttgctgctaatcgcgacaacgtggcgtcgagacttttgaactaaaatacaattatatctttttcgatattaataaatccgtgtcgcccgggttttttatctctttcagtatgtgaatagataggtattttatctctattcatcatcgaatttaagagatccgataaacattgtttgtattctcccgatgtcagcatctgatacaacaatatatgtgcacataaacctctggcacttatttcatgtaccttccccttatcactaaggagaatagtatttgagaaatatgtatacatgatattatcatgaattagatatacagaatttgtaacactctcgaaatcacacgatgtgtcggcattaagatctaatatatcgctcgataacacattttcatctagatacactagacattttttaaagctaaaatagtctttagtagtaacagtaactatgcgattattttcatcgatgatacatttcatcggcatattattacgcgtaccatcaaagactataccatgtgtatatctaacgtattctagcatagttgccatacgcgcattaaacttttcaggatctttggatagatcttccaatctatctatttgagaaaacatttttatcatgttcaatagttgaaacgttggatccactatatagatattatctataaagattttaggaactacgttcatggtatcctggcgaatattaaaactatcaatgatatgattatcgttttcatcttttatcaccatatagtttctaagatatgggattttacttaatataatattatttcccgtaataaattttattagaaatgccaaatctataagaaaagtcctcgaattagtttgaagaatatctatatcgccgtaccgtatatttggattaattagatatagagaatatgatccgtaacatatacaactcttattatggcgtctaagatattcttccatcaacttattaacatttttgactagggaagatacattatgacgtcccattacttttgccttgtctattaccgcgacgttcatagaatttagcatatctcttgccaattcttccattgatgttacattataagaaattttagatgaaattacatttggagctttaatagtaagaactcctaatatatccgtgtatgtggtcactaatacagattgtagttctataatcgtaaataatttacctatattatatgtttgagtctgtttagaaaagtagctaagtatacgatcttttatttctgatgcagatgtatcaacatcggaaaaaaatctttttttattcttttttactaacgatacaaatatgtctttgttaaaaacagttattttctgaatatttctagcttgtaattttaacatatgatattcgtttacactaggtattctgcctaaataggtttctataatctttaatgtaatattaggaagagtattctgatcaggattcctattcattttgaggatttaaaactctgattattgtctaatatggtctcaacgcaaactttttcacagagcgatagagtttttgataactcgtttttcttaagaaatataaaactactgtctccagagctcgctctatcttttattttatctaattcgatacaaactcctgatactggttcagaaagtaattcattaattttcagtcctttatagaagatagttaatatagatagtacaaaatcttcagttcttgataccgatcggattgatcctagaactagatatattaataaagtactcattaggcagtttatggcagcttgataattagatatagtatattccagttcatatttattagataccgcattgcccagattttgatattctatgaattcctctgaaaataaatctaaaataactagacattctattttttgtggattagtgtactctcttccctctatcatgttcactactggtgtccacgatgacaaatatctagagggaatataatatagtccataggatgccaatctagcaatatcaaataactgtaattttattcttctctcttcattatgaattaattcttgaggtataaacctaacacaaattatattattagacttttcgtatgtaatgtctttcatgttataagtttttaatcctggaatagaatctatcttaatgaggcttttaaatgcggagttctccaacgagtcaaaacataatactctgttgtttttcttatatacgatgttacgattttcttctttgaatggaataggtttttgaattagtttataattacaacataatagatacggaagtgtacaaatagtacgcggaaaaaacataatagctcccctgttttcatccatggttttaagtaaatgatcactggcttccttagtcaatggatattcgaacattaaccgtttcatcatcattggacaaaatccatatttcttaatgtaaagagtaatcaaatcattgtgtttattataccatcttgttgtaaatgtgtattctgttatcggatctgctcctttttctattaaagtatcgatgtcgatctcgtctaagaattcaactatatcgacatatttcatttgtatacacataaccattactaacgtagaatgtataggaagagatgtaacgggaactgggtttgttgattcacaaactattctaatacatagttcttctgttaatacgtcttgtacgtaatctattatagatgccaagatatctatataattattttgtaatatgatgttaactatgtgatctatataagtagtgtaatatttcatgtatttggatatatgttccaactctgtctttgtgatgtctagtttcgtaatatctatagcatcctcaaaaaatatattcgcatatattcccaagtcttcagttctatcttctaaaaaatcttcagcgtatggaatataataatctattttgcctcttctgatgtcattaatgatatagtttttgacactattttccgtcaattgattcttattcactatatctaagaaacggatagcgtccctaggacgaactactgccattaatatctctattatagcttctggacataattcatctattataccagaattaatgggaactattccgtatctatctaacatagttttaagaaagtcagaatctaagacctgatgttcatatattggttcatacatgaaatgatctctattgatgatagtgactatttcattctctgaaaattggtaactcattctatacacgctttccttgttgataaaggatagtatatactcgatggaatttgtaccaacaaactgttctcttatgaatcgtatatcatcatctgaaataatcatgtaaggcatacacttaacaattagagacttgtctcctgttatcaatatactattcttgtgataatttatgtgtgaggcaaatttgtccacgttttttaattttgttatagtagatatcaaatccaatggagctacagttcttggcttaaacagatatagtttttctggaacgaattctacaacattattataaagaactttgggtagataagtgggatgaaatcctattttaattaatgcgatagccttgtcctcgtgcagatatccaaacgcctttgtgatagtatgacattcattgtctagaaacgctctacgaatatctgtaacagatatcatctttagagaatactagtcgcgttaatagtactaaaatttgtattttttaatctatctcaataaaaaaattaatatgtatgattcaatgtataactaaactactaactgttattgataactagaactagaatcagaatctaatgatgacgtaaccaagaagtgtatctacagccaatttagctgcattatttttagcatctcgtttagattttccatctgccttatcgaatactcttccgtcgatgtctacacaggcataaaatgtaggagagttactaggccccactgattcaatacgaaaagaccaatctctcttagttatttggcagtactcattaataatggtgacagggttagcatctttccaatcaataatttttttagccggaataacatcatcgaaagacttatgatcctctctcattgatttttcgcgggatgcatcatctattatggaatcagccatagcatcagcatccggcttatccgcctccattgtcgtaaaccaacgaggaggaatatcgtcggagctgtacaccatagcactacgttgaagatcgtacagagctttattaacttctcgcttctccatattaagttgtctagttagttgtacagcagtagctccttcgagtccaatgtttttaatagcctcacacacaatctctgcgtcagaacgttcgtcgatatagatcttagacatttttagagagaaatgacgcaaaaccagtaataaaactaatctattttatcatttttattcatcatcttctggtggttcgtcgttcctatcgaatgtggctctgattaacccgtcatctataggcgatgctggttctggagattctggaggagatggattattatctggaagaatctctgttatttccttgttttcatgtatcgattgcgttgtaacattaagattgcgaaatgctctaaatttgggaggcttgaagtgttgtttgcaatctctacacgcgtgtctaactaatggaggttcatcagcagctctagtttgaatcatcatcggtgtagtattcctacttttacagttaggacacggtgtattgtatttctcgtcgagaacgttaaaataatcgttgtaactcacatcctttattttatctatattgtattctactcctttcttaatgcattttataccgaacaagagatagcgaaggaattctttttcggtaccgctagtacccttaatcatgtcacatagtgttttatattccaaatttgtggcaatggacggtttatttctatacgatagtttgtttctggaatcctttgagtattctataccaatattattctttgattcgaatttagtttcttcgatattagattttgtattacctatattcttgatgtagtactttgatgatttttccatggcccattctattaagtcttccacgctggtattatcatccacatattgtgatagtaactctcggatatcagtagcggctaccgccattgatgtttgttcatttgatgagtaactactactaatgaatacattttccatttataacacttatgtattaactttgatcatttatattttttcattattatgttgatattaacaaaagtgaatatatatgttaataattatggtgtggtgtgtacggccacaatttcataatgagtggaagtcagtgtcctatgatcaatgacgatctatttagagttactttgaaaagaatgcatccactcaatagtgaggagtcgagtatgaaaatagataagaagaggacaaagtttcagaatagagccaaaatggtaaaagaaataaatcagacaataagagcagcacaaactcattacgagacattgaaacaaggatacctaaaatttaagagaatgattagaactgctactctaaaagatatagcaccatctattccaaaaattcagaaattttataaactattctcggacatttcagccatcagcaaagcatcacagaatccgagtaagatggtatatgctctactgctttacatgtttcccaatttgtttggagatgaccatagattcattcgttatagaatgcatccaatgagcaaaatcaaacacaagatcttctccccgttcaaacttaatcttattagaatattagtggaagaaagattctataataatgaatgcagagattataaatggagaataattggaacacaagttgataaaatattgatagctgaatctgctaaatatacaatagatgcaaggtatcgcctaagacctatatatagaatcaagggagaatctgaagaagataccctcttcatcaaacagatggtagagaaatgtgtaacgtctcaggaattggtggagaaagtgttgaagatactgtttaaagatttgttcaagagtggagaatacaaagattacagatacgatgatgatgtagacaatggattcattggattggacaaactaaaattaaacattgttcacgatatagttgaaccatgtatgcctgttcgtaggccagtggctaaggtactgtgtaaagaaatggtaaataaatactttgagaatcctctacatatcattggtaagaatctccaagagtgcattgactttgttagtgagtaggcatttcatcttttcctttctcaatactattcaacttgttaaattaataatggatagtttaaaatagttattagtagtaataagatagtttaaaatagttattagtagtaataagatagtttaaaatagttattagtagtaataagatagtttaaaatagtataaaatagataagtatttactctcttctataaaaatggattttattcgtagaaagtatcttatatacacagtagaaaataatatagattttttaaaggatgatacattaagtaaagtaaacaattttaccctcaatcatgtattagctctcaagtatctagttagcaatttcccccaacatgttattactaaggatgtattagctaataccaatttttttgttttcatacatatggtacgatgttgtaaagtgtacgaagcggttttacgacacgcatttgatgcacccacgttgtacgttaaagcattgactaagaattatttatcgtttagtaacgcaatacaatcgtacaaggaaaccgttcataaactaacacaagatgaaaaatttttagaggtagccgaatacatggaagaattaggagaacttataggggtaaattatgacttagttcttaatccattatttcacggaggggaacccatcaaagatatggaaatcatttttttaaaactatttaagaaaacagacttcaaagttgttaaaaaattaagtgttataagattacttatttgggcatacctaagcaagaaagatacaggcatagagtttgcggataatgatagacaagatatatatactctatttcaacaaactggtagaatagtccatagcaatctaacagaaacgtttagagattatatctttcccggagataagactagctattgggtgtggttaaacgaaagtatagctaatgatgcggatatcgttcttaatagacccgccattaccatgtatgataaaattcttagttatatatactctgagataaaacagggacgcgttaataaaaacatgcttaagttagtttatatctttgagcctgaaaaagatatcagagaacttctgctagaaattatatatgatattcctggagatatcctatctattattgatgcaaaaaacgacgattggaaaaaatattttattagtttttacaaagctaattttatcaacggtaatacatttattagtgatagaacgtttaacgaggacttattcagagttgttgttcaaatagatcccgaatatttcgataatgaacgaattatgtctttattctctacgagtgctgcggacattaaacgatttgatgagttagatattaataacagttatatatctaatataatttatgaggtgaacgatataacattagatacaatggatgatatgaagaagtgtcaaatctttaacgaggatacatcgtattatgttaaggaatacaatacatacctgtttttgaacgagacggatcccatggtcatagagaacggaatactaaagaaactgtcatctataaaatccaagagtagacgactgaacttgtttagcaaaaacattttaaaatattatttagacggacaattggctcgtctaggtcttgtgttagatgattataagggagacttgttagttaaaattataaaccatctcaagtctgtggaggatgtatcagcattcgttagattttctacagataaaaaccctagtattcttccatcgctaatcaaaactattttagctagttataatatttccatcatcgtcctatttcaaaagtttttaagagataatctatatcatgtagaagaattcttggataaaagcatccatctaaccaagacggataagaaatatatacttcaattgataaggcacggcagatcatagaacaaaccaaatatacatattaaaaattcacacatttttgataaatgggaactgctgcaacaattcagactcccaccaaattaatgaataaagagaatgcagaaatgattttggaaaaaattgttgatcatatagttatgtatattagtaacgaatcaagtgatgaaaataatcctgaatatattgattttcgtaacagatacggagactatagatctctcattataaaaagtgatcacgagtttgtaaagctatgtaaagatcatgccgagaaaagttctccagaaacacaacaaatgataatcaaacacatctacgaacaatatcttattccggtatctgaagtactattaaaacctatgatgtccatgggtgacataattacatataacggatgtaaagacaatgaatggatgatagaacaactctctaccctaaactttaacaatctccgcacatggaactcatgtagcataggcaatgtaacgcgtctgttttatacattttttagttatctgatgaaagataaactaaatatataagtataatcataatcccattctaatactttaacctgatgtattatgtatcacctgcatcttattagaatattaacctaactaaaagacataacataaaaactcattacatagttgataaaaagcggtaggatataaatattatggctgccgccgttccgcgttttgacgacgtgtacaaaaatgcacaaagaagaattctagatcaagaaacattttttagtagaggtctaagtagaccgttaatgaaaaacacatatctatttgataattacgcgtatggatggataccagaaactgcaatttggagtagtagatacgcaaacctagatgctagtgactattatcccatttcgttgggattacttaaaaagtttgagtttctcatgtctctatataaaggtcctattcccgtatatgaagaaaaaataaatactgaattcattgctaatggatctttctccggtagatacgtatcatatcttagaaagttttctgcccttccaacaaacgagtttattagttttttattattgacctccatccctatctataatatcttattctggtttaaaaacacacagtttgatattactaaacacacattattcagatacgtctatacagataatgccaaacacctggcgttggctaggtatatgtatcaaacaggagactataagcctttgtttagtcgtctcaaagagaattatatatttaccggtcctgttccgataggaatcaaagatatagatcaccctaatcttagtagagcaagaagtccatccgattatgagacattagctaatattagtactatattgtactttaccaagtatgatccagtattaatgtttttattgttttacgtacctgggtattcaattactacaaaaattactccagccgtagaatatctaatggataaactgaatctaacaaagagcgacgtaaaactgttgtaaattattttatgcttcgtaaaatgtaggttttgaaccaaacattctttcaaagaatgagatgcataaaactttattatccaatagattgactatttcggacgtcaatcgtttaaagtaaacttcgtaaaatattctttgatcactgccgagtttaaaacttctatcgataattgtttcgtatgttttaatatttacaagttttttggtccatggtccattaggacaaatatatgcaaaataatatcgttctccaagttctatagtctctggattatttttattatattcagtaaccaaatacatattagggttatctgcggatttataatttgaatgatgcattcgactcaacataaacaattctagaggagacgacctactatcaaattcggatcgtaaatctgtttctaaagaacggagaatatctatacatacctgattagaattcatccgtccttcagacaacatctcagacagtctggtcttgtatatcttaatcatgttcttatgaaacttggaaacatctcttctagtttcactagtacctttattaattctctcaggtacagattttgaattcgacgatgccgagtatttcatcgttgtatatttcttcttcgattgcataattagattcttatatacagcctcaaactctattttaaaattattaaacaatactctactattaatcagtcgttctaactcctttgctatttctatggacttatcgacatcttgactgtctatctctgtaaacacggagtcggtatctccatacacgctacgaaaacgaaatctgtaatctataggcaacgatgttttcactatcggattaatatctctatcgtccatataaaatggattacttaatggattggcaaaccgtaacataccgttagataactctgctccatttagtaccgattctagatacaagatcattctacgtcctatggatgtgcaactcttagccgaagcgtatgagtatagagcactatttctaaatcccatcagtccatacaccgagttggctactatcttgtacgtatattgcatggaatcatagatggccttttcagttgaactggtagcctgttttaacatctttttatatctggctctctctgccaaaaatgttctcaatagtctaggaatggttccttctatcgatctatcgaaaattgctatttcagagatgaggttcggtagtctaggttcacaatgaaccgtaatatatctaggaggtggatatttctgaagtaagagctgattatttatttcttcttccaatctattggtactaacgacgacaccgactaatgtttccggagatagatttccaaagatacacacattaggatacagactgttataatcaaagattaatacattattactaaacattttttgttttggagcaaataccttaccgccttcgtatggaaacttttgttttgtttctgatctcactaagatggttttagtttccaacaatagctttaacagtggacccttgatgactgtactcgctctatattcgaataccattgattgaggaagcacatatgttgacgcacccgcatctgtttttgtttctactccgtaatactcccacaaatactgacacaagcaagcatcatgaatacagtatctagccatatctaaagctatgtttagattataatccttatacatctgtgctagatcaacgtcatcctttccgaaagataatttatacgtatcatttgttaaagtgggacacgatagaacgaccttgaatccattttcccaaatatctttatgaattactttacatataatatcatcatcaaccgtcacataattacccgtggttaaaacctttgcgaatgcagcggctttgcctttagcgtccgtagtatcgtcaccgatgaacgtcatttctctaactcctctatttaatactttgcccatgcaactgaacgcgttcttggatatagaatccaatttgtacgaatccaatttttcagacttttgaatgaatgaatacagatcgaaaaatatagttccattattgttattaacgtgaaacgtagtattggccatgccacctactcccttgtgactagactgatttctctcataaatacagagatgtacagcttcctttttgtctggagatctaaagataatcttctctccggttaataactctagacgattagtaatatatctcagatcaaagttatgtccgttaaaggtaacgatatagtcgaacgttagttccaacaattgtttagctatttgtagcaaaactatttcagaacacagaactagttctcgttcataatccatttccatcagtgactgtatcctcaaacatcctctatcgacggcttcttgtatttcctgttccgttaacatctcttcattaatgagcgtaaacaataatcgtttaccgcttaaatcgatataacagtaacttgtatgcgagattggattaataaatacagaaggaaatttcttatcaaagtgacactctatatctagaaataagtacgatcttggaatatcgaatctaggtatttctttagcgaaacagttacgtggatcgtcgcaatgataacatccattgttaatctttgtcaaatattgctcgtccaacgagtaacatccgtctggagatatcccgttagaaatataaaaccaactaatattgagaaattcatccatggtggcattttgtatgttgcgtttctttggctcttctatcaaccacatatctgcgacggagcattttctatctttaatatctaaattataacttatcgtctcatcaatgtctatagttctcatctttcccatcggtctcgcattaaatggaggaggagccaatgactgatatatttcgtccgtcactacgtaataaaagtaatgaggaaatcgtataaatacggtctcgccatttcgacatctggatttcagatataaaaatctgttttcaccccgactttcgaaccaattaatgcaccgaacatccatttctagaatttagaaatatattttcatttaaatgaatcccaaacattggggaagagccgtatggaccattatttttatagtactttctcaagcgggtttagacggcaacatagaagcgtgtaaacgaaaactatatactatagtcagcacgcttccatgtcctgcatgtagacggcacgcgactatcgctatagaggacaataatgtcatgtctagcgatgatctgaattatatttattattttttcatcagattatttaacaatttggcatctgataccaaatacgcaatcgatgtgtcaaaggttaaacctttataaacttaacccattataaaacttatgattagtcacgactgaaataacggcgtgattattttttggtataattctacacggcatagtttctgtgactatgaattcaacacccgttatcttagtgaaatctttaacaaacagcaagggttcgtcaaagacataaaactcattgtttacgatcgaaatagatcccctatcacacttaaaataaaaaatatccttatcctttaccaccaaataaaattctgattggtcaatgtgaatgtattcacttaacagttccacaaatttatttattaactccgaggcacatacatcgtcggtattttttatggcaaactttactcttccagcatccgtttctaaaaaaatattaacgagttccatttatatcgtccaatattattgaaatgacgttgatggacagatgatacaaataagaaggtacggtacctttgtccaccatctcctccaattcatgctctattttgtcattaactttaatgtgtgaaaacagtactccacatgcttccatgacagtgtgtaacactttggatacaaaatgtttgacattagtataattgtccaagactgtcaatctataatagatagtagctataatatattctatgatggtattgaagaagatgacaaccttggcatattgatcatttaacacagacatggtatcaacagatagcttgaatgaaagagaatcagtaattggaataagcgtcttctcgatggagtgtccgtataccaacatgtctgatattttgatgtattccattaaattatttagttttttctttttattctcgttaaacagcatttctgtcaatggaccccaacatcgttgaccgattaagttttgattgatttttccatgtaaggcgtatctagtcagatcgtatagcctatccaataatccatcatctgtgcgtagatcacatcgtacactttttaattctctatagaagagcgacagacatctggagcaattacagacagcaatttctttattctctacagatgtaagatacttgaagacattcctatgatgatgcagaattttggataacacggtattgatggtatctgttaccataattcctttgatggctgatagtgtcagagcacaagatttccaatctttgacaatttttagcaccattatctttgttttgatatctatatcagacagcatggtgcgtctgacaacacagggattaagacggaaagatgaaatgattctctcaacatcttcaatggataccttgctattttttctggcattatctatatgtgcgagaatatcctctagagaatcagtatcctttttgatgatagtggatctcaatgacatgggacgtctaaaccttcttattctatcaccagattgcatggtgatttgtcttctttcttttatcatgatgtaatctctaaattcatcggcaaattgtctatatctaaaatcataatatgagatgtttacctctacaaatatctgttcgtccaatgttagagtatctacatcagttttgtattccaaattaaacatggcaacggatttaattttatattcctctattaagtcctcgtcgataataacagaatgtagataatcatttaatccatcgtacatggttggaagatgcttgttgacaaaatctttaattgtcttgatgaaggtgggactatatctaacatcttgattaataaaatttataacattgtccataggatactttgtaactagttttatacacatctcttcatcggtaagtttagacagaatatcgtgaacaggtggtatattatattcatcagatatacgaagaacaatgtccaaatctatattgtttaatatattatatagatgtagcgtagctcctacaggaatatctttaactaagtcaatgatttcatcaaccgttagatctattttaaagttaatcatataggcattgatttttaaaaggtatgtagccttgactacattctcattaattaaccattccaagtcactgtgtgtaagaagattatattctatcataagcttgactacatttggtcccgataccattaaagaattcttatgatataaggaaacagcttttaggtactcatctactctacaagaattttggagagccttaacgatatcagtgacgtttattatttcaggaggaaagaatctaacattgagaatatcggaattaatagcttccagatacagtgattttggcaatagtccgtgtaatccataatccagtaacacgagctggtgcttgctagacaccttttcaatgtttaatttttttgaaataagctttgataaagccttcctcgcaaattccggatacatgaacatgtcggcgacatgattaagtattgttttttcattattttctcaacaagttctcaataccccaatagatgatagaatatcacccaatgcgtccatgttgtctatttccaacaggtcgctatatccaccaatagaagttttcccaaaaaagattctaggaacagttctaccaccagtaatttgttcaaaataatcccgcaattcattttcgggtttaaattctttaatatcgacaatttcatacgctcctcttttgaaactaaacttatttagaatatccagtgcatttctacaaaaaggacatgtatacttgacaaaaattgtcactttgttattggccaacctttgttgtacaaattcctcggccattttaatatttaagtgatataaaactatctcgacttatttaactctttagtcgagatatatggacgcagatagctatatgatagccaactacagaaggcaaacgctataaaaaacataattacgacgagcatatttataaatatttttattcagcattacttgatatagtaatattaggcacagtcaaacattcaaccactctcgatacattaactctctcattttctttaacaaattctgcaatatcttcgtaaaaagattcttgaaactttttagaatatctatcgactctagatgaaatagcgttcgtcaacatactatgttttgtatacataaaggcgcccattttaacagtttctagtgacaaaatgctagcgatcctaggatcctttagaatcacatagattgacgattcgtctctcttagtaactctagtaaaataatcatacaatctagtacgcgaaataatattatccttgacttgaggagatctaaacaatctagttttgagaacatcgataagttcatcgggaatgacatacatactatctttaatagaactcttttcatccagttgaatggattcgtccttaaccaactgattaatgagatcttctattttatcattttccagatgatatgtatgtccattaaagttaaattgtgtagcgcttctttttagtctagcagccaatactttaacatcactaatatcgatatacaaaggagatgatttatctatggtattaagaattcgtttttcgacatctgtcaaaaccaattcctttttgcctgtatcatccagttttccatcctttgtaaagaaattattttctactagactattaataagactgataaggattcctccataattgcacaatccaaactttttcacaaaactagactttacaagatctacaggaatgcgtacttcaggtttcttagcttgtgattttttcttttgcggacattttctagtaaccaactcatctaccatttcattgattttagcagtgaaataagctttcaatgcacgggcactgatactattgaaaacgagttgatcttcaaattccgccatttaagtttaccaaacaacttttaaatacaaatatatcaatagtagtagaataagaactataaaaaaaataataattaaccaataccaaccccaacaaccggtattattagttgatgtgactgttttctcatcacttagaacagatttaacaatttctataaagtctgtcaaatcatcttccggagaccccataaatacaccaaatatagcggcgtacaacttatccatttatacattgaatattggcttttctttatcgctatcttcatcatattcatcatcaatatcaacaagtcccagattacgagccagatcttcttctacattttcagtcattgatacacgttcactatctccagagagtccgataacgttagccaccacttctctatcaatgattagtttcttgagtgcgaatgtaatttttgtttccgttccggatctatagaaaactacaggtgtgataattgccttggccaattgtctttctcttttactgagtgattctagttcaccttctatagatctgagaatggatgattctccagccgaaacatattctaccatggctccgtttaatttgttgatgaagatggattcatccttaaatgttttctctgtaatagtttccaccgaaagactatgcaaagaatttggaatgtgttccttgtgcttaatgtttccatagacggattctagaagttgatacaacataggactagccgcggtaacttttatttttagaaagtatccatcgcttctatcttgtttagatttatttttataaagtttagtctctccttccaacataataaaagtggaagtcatttgactagataaactatcagtaagttttatagagatagacgaacaattagcgtattgagaagcatttagtgtaacgtattcgatacattttgcattagatttactaatcgattttgcatactctataacacccgcacaagtctgtagagaatcgctagatgcagtaggtcttggtgaagtttcaactctcttcttgattaccttactcatgattaaacctaaataattgtactttgtaatataatgatatatattttcactttatctcatttgagaataaaaatgtttttgtttaaccactgcatgatgtacagatttcggaatcgcaaaccaccagtggttttattttatccttgtccaatgtgaattgaatgggagcggatgcgggtttcgtacgtagatagtacattcccgtttttagaccgagactccatccgtaaaaatgcatactcgttagtttggaataactcggatctgctatatggatattcatagattgactttgatcgatgaaggctcccctgtctgcagccatttttatgatcgtcttttgtggaatttcccaaatagttttataaactcgcttaatatcttctggaaggtttgtattctgaatggatccaccatctgccataatcctattcttgatctcatcattccataattttctctcggttaaaactctaaggagatgcggattaactacttgaaattctccagacaatactctccgagtgtaaatattactggtatacggttccaccgactcattatttcccaaaatttgagcagttgatgcagtcggcataggtgccaccaataaactatttctaagaccgtatgttctgattttatcttttagaggttcccaattccaaagatccgacggtacaacattccaaagatcatattgtagaataccgttactggcgtacgatcctacatatgtatcgtatggtccttccttctcagctagttcacaactcgcctctaatgcaccgtaataaatggtttcgaagatcttcttatttagatcttgtgcttccaggctatcaaatggataatttaagagaataaacgcgtccgctaatccttgaacaccaataccgataggtctatgtctcttattagagatttcagcttctggaataggataataattaatatctataattttattgagatttctgacaattactttgaccacatccttcagtttgagaaaatcaaatcgcccatctattacaaacatgttcaaggcaacagatgccagattacaaacggctacctcattagcatccgcatattgtattatctcagtgcaaagattactacacttgatagttcctaaattttgttgattactctttttgttacacgcatccttataaagaatgaatggagtaccagtttcaatctgagattctataatcgctttccagacgactcgagcctttattatagatttgtatctcctttctctttcgtatagtgtatacaatcgttcgaactcgtctccccaaacattgtccaatccaggacattcatccggacacatcaacgaccactctccgtcatccttcactcgtttcataaagagatcaggaatccaaagagctataaatagatctctggttctatgttcctcgtttcctgtattctttttaagatcgaggaacgccataatatcagaatgccacggttccaagtatatggccataactccaggccgtttgtttcctccctgatctatgtatctagcggtgttattataaactctcaacattggaataataccgtttgatataccattggtaccggagatatagcttccactggcacgaatattactaattgatagacctattccccctgccattttagagattaatgcgcatcgttttaacgtgtcatagataccctctatgctatcatcgatcatgttaagtagaaaacagctagacatttggtgacgactagttcccgcattaaataaggtaggagaagcgtgcgtaaaccatttttcagaaagtagattgtacgtctcgatagctgagtctatatcccattgatgaattcctactgcgacacgcattaacatgtgctgaggtctttcaacgatcttgttgtttattttcaacaagtaggatttttccaaagttttaaaaccaaaatagttgtatgaaaagtctcgttcgtaaataataaccgagttgagtttatccttatatttgttaactatatccatggtgatacttgaaataatcggagaatgtttcccatttttaggattaacatagttgaataaatcctccatcacttcactaaatagtttttttgtttccttgtgtagatttgatacggctattctggcggctagaatggcataatccggatgttgtgtagtacaagtggctgctatttcggctgccagagtgtccaattctaccgttgttactccattatatattccttgaataaccttcatagctattttaataggatctatatgatccgtgtttaagccataacataattttctaatacgagacgtgattttatcaaacatgacattttccttgtatccatttcgtttaatgacaaacatttttgttggtgtaataaaaaaattatttaacttttcattaatagggatttgacgtacgtagcgtacaaaatgatcgttcctggtatatagataaagagtcctatatatttgaaaatcgttacggctcgattaaactttaatgattgcatagtgaatatatcattaggatttaactccttgactatcatggcggcgccagaaattaccatcaaaagcattaatacagttatgccgatcgcagttagaacggttatagcatccaccatttatatctaaaaattagatcaaagaatatgtgacaaagtcctagttgtatactgagaattgacgaaacaatgtttcttacatatttttttcttattagtaactgacttaatagtaggaactggaaagctagacttgattattctataagtatagatacccttccaaataatattctctttgataaaagttccagaaaatgtagaattttttaaaaagttatcttttgctattaccaagattgtgtttagacgcttattattaatatgagtaatgaaatccacaccgcctctagatatcgcttttatttccacattagatggtaaatccaatagtgaaactatctttttaggaatgtatggactcgcgtttagaggagtgaacgtcttgggcgtcggaaaggatgattcgtcaaacgaataaacaatttcacaaatggatgttaatgtattagtaggaaatttcttgacgctagtggaattgaagattctaatggatgatgttctacctatttcatccgataacatgttaatttccgacaccaacggttttaatatttcgatgatatacggtagtctctctttcggacttatatagcttattccacaatacgagtcattatatactccaaaaaacaaaataactagtataaaatctgtatcgaatgggaaaaacgaaattatcgacataggtatagaatctggaacattgaacgtattaatacttaattctttttctgtggtaagtaccgataggttattgacattgtatggttttaaatattctataacttgagacttgatagatattagtgatgaattgaaaattatttttatcaccacgtgtgtttcaggatcatcgtcgacgcccgtcaaccaaccgaatggagtaaaataaatatcattaatatatgctctagatattagtatttttatcaatcctttgattatcatcttctcgtaggcgaatgattccatgatcaagagtgatttaagaacatcctccggagtattaatgggcttagtaaacagtccatcgttgcaataataaaagttatccaagttaaaggatattatgcattcgtttaaagatatcacctcatctgacggagacaattttttggtaggttttagagactttgaagctacttgtttaacaaagttattcatcgtcgtttactattctatttaattttgtagttaatttatcacatatcacattaattgactttttggtccatttttccatacgtttatattcttttaatcctgcgttatccgtttccgttatatccagggatagatcttgcaagttaaatagaatgctcttaaataatgtcatttttttatccgctaaaaatttaaagaatgtataaacttttttcaaagatttaaaacttttaggtggagttctagtacacaatatcataaacaaactaataaacatcccgcattcagattccaacagctgattaacttccacattaatacagcctattttcgctccaaatgtacattcgaaaaatctgaataaaacatcgatgtcacaatttgtattatccaatacagaatgtttgtgattcgtgttaaaaccatcggagaaggaataaaaataaaaattattatagtggtggaattcagttggaatattgcctccggagtcataaaaggatactaaacattgttttttatcataaattacacatttccaatgagacaaataacaaaatccaaacattacaaatctagaggtagaacttttaattttgtctttaagtatatacgataagatatgtttattcataaacgcgtcaaatttttcatgaatcgctaaggagtttaagaatctcatgtcaaattgtcctatataatccacttcggatccataagcaaactgagagactaagttcttaatacttcgattgctcatccaggctcctctctcaggctctattttcatcttgacgacctttggattttcaccagtatgtattcctttacgtgataaatcatcgattttcaaatccatttgtgagaagtctatcgccttagataccttttctcgtagtcgaggtttaaagaaatacgctaacggtatactagtaggtaactcaaagacatcatatatagaatggtagcgcatctttaactcgtcagttagctctttcttttgatcgagttcgtcgctactattgggtctactcaggtgcccagactctactagttccaacatcataccgataggtatacaagacactctgccagcggttgtagatttatcatatttctctactacatatccgttacaatttgttaagaatttagatacatctatattgctacataatccagctagtgaatatatatgacataataaattggtaaatcctagttctggtattttactaattactaaatctgtatatctatccatttatcatggaaaagaatttacccgatatcttcttttttccaaactgcgttaatgtattctcttacaaatattcacaagatgaattcagtaacatgagcaaaacggaacgtgcaagtttctcattggcagtgtttccagtgataaaacatagatggcataacgcacacgttgtaaaacataaaggaatatacaaagttagtgcagaagcacgtggagaaaaagtatctcctccatcactaggaaaacctgtttacataaacctaactacgaggcaatatatatacagtgagtatgcaataagctttgaatgttatagttttctaaaatgtataacaaatacagaaatcaattcgttcgatgattatatattaagaggactattggaagcgggtaatagtttacagatattttccaattctgtgggtaaacggatagatactgtaggtgtactagggaacaagtatccgtttagtaaaattccattggcctcattaactccgaaagcacaacgagagatattttcagcgtggatttctcatagacctgtagttttaactggaggaaccggagtgggtaagacgtcacaggtacccaagttattgctttggtttaattatttatttgggggattctctactctagataaaatcactgactttcacgaaagaccagtcattctatctcttcctaggatagctttagttagattgcatagcaataccattttaaaatcattgggatttaaggtactaaatggatctcctatttctttacggtacggatctataccggaagaattaataaacaaacaaccaaaaaaatatggaattgtattttctacccataagttatctctaacaaaactatttagttatggcactcttattatagacgaagttcatgagcatgatcaaataggagatattattatagcagtagcgagaaagcatcatacgaaaatagattctatgtttttaatgactgccacattagaggatgacagagaacgtctaaaagtatttttacccaatcccgcatttatacatattcctggagatacactgtttaaaattagcgaggtatttattcataataagataaatccatcttccagaatggcatacatagaagaagaaaagagaaatttagttactgctatacagatgtatactcctcctgatggatcatccggcatagtcttcgtggcatccgttgctcaatgtcatgaatataaatcatatttagaaaagagattgccgtacgatatgtatattattcatggtaaggtcttagatatagacgaaatattagagaaagtgtattcatcacctaacgtatcgataattatttctactccttatttggaatccagcgttactatacgcaatgttacacacatttatgatatgggtagagtttttgttcctgctccttttggaggatcgcaacaatttatttctaaatctatgagagatcaacgaaaaggaagagtaggaagagttaatcctgggacatacgtctatttctatgatctgtcatacatgaagtctatacagcgaatagattcagaatttctacataattatatattatacgctaataagtttaatctaacactccccgaagatttgtttataattcctacaaatttggatgttctgtggcgtacaaaggaatatatagactcgttcgatattagtacagaaacatggaataaattattatccaattattatatgaagataatagagtatgcgaaactttatgtactaagtcctattctcgctgaggagttggataactttgagagaactggagaattaactagtacggtaaaagaagccattttatctctaaatttacgaattaagattttaaattttaaacataaagatgaggatacgtatatacacttttgtagagtattatttggtgtctataacggaacaaacgctactatatattatcatcgccctctaactggatatatgaatatgatttcagatactatatttgttcctgtagataataactaaaaatcaaactctaattaccacatctttttttagagatgaaaaattttccacatctccttttgtagacacgactaaacattttgcagaaaaacgtttattattatttagataatcgtatacttcatcagtgtagatagtaaatgtgaacagataaaaggtattcttgctcaataaattggtaaattccatagaatatattaatcctttcttcttgagatcccacatcatttcaaccaaagacgttttatccaatgatttacctcgtactataccacatacaaaactagattttgcagtgacgtcgtacctggtattcctaccaaacaaaattttacttttagttcttttagaaaattctaaggtagaatctctatttgccaatatgtcatctatggaattaccactagcaaaaaatgatagaaatatatattgatacatcgcagctggttttgatctactatactttaaaaacgaatcagattccataatggcctgtatatcatccgccgaaaaactatgttttacacgtattccttcggcatttctttttaatgatatatcttgtttagataatgataaagttatcatgtccatgagagacgcgtctccgtatcgtataaatatttcattagatgttagacgcttcattaggggtatacttctataaggtttcttaatcagtccatcattggttgcgtcaagaactactatcggatgttgttgggtatctctagtgttacacatggccttactaaagtttgggtaaataactatgatatctctattaattatagatgcatatatttcattcgtcaaggatattagtatcgacttgctatcgtcattaatacgtgtaatgtaatcatataaatcatgtgatagccaaggaaaattcaaatagatgttcatcatataatcgtcgctataattcatattaatactttgacattgactaatttgtaatatagcctcgccacgaagaaagctctcgtattcagtttcatcgataaaggataccgttaaatataactggttgccgatagtctcatagtctattaagtggtaagtttcgtacaaatacagaatccctaaaatattatctaatgttggattaatctttaccataactgtataaaatggagacggagtcataactattttaccgtttgtacttactggaatatatgaaggaataatctccgggcatgctggtaaagacccaaatgtctgtttgaagaaatccaatgttccaggtcctaatctcttgacaaaaattacgatattcgatcccgatatcctttgcattctatttaccagcatatcacgaactatattaagattatctatcatgtctattctcccaccgttatataaatcgcctccgctaagaaacgttagtatatccatacaatggaatacctcatttctaaaatagtattcgttttctaattctttaatgtgaaatcgtatactagaaagggaaaaattatctttgagttttccgttagaaaagaaccacgaaactaatgttctgattgcgtctgactccgtcgctgaattaatggatttacaccaaaaactcatataacttctagatgtagaagcattcgctaaaaaattagtagaatcaaaggatataagtagatgttccaacaagtgagcaattcccaagatttcatctatatcattctcgaatccgaaattagaaattcccaagtagatatcctttttcatccgatcattgatgaaaatacgaactttattcggtaagacgatcatttactaaggagtaaaataggaagtaatgttcgtatatcgttatcgtcgtataaattaaaggtgtgttttttgccattaagtgacattataattttaccaatattggaattataatataggtgtatttgagcactagaaacggtcgatgcatcggtaaatatagctgtatctaatgttctagtcggtatttcatcatttcgctgtctaataatagcgttttctctatctgtttccagcacagctgcctgaagtttattggtaggataatatgtaaaataataagaaatacatacgaataacaaaaataaaataagatataataaagatgccatttagagatctaattttgttcaacttgtccaaattcctacttacagaagatgaggaatcgttggagatagtatcttccttatgtagaggatttgaaatatcttacgatgacttaatatcgtactttccagataggaaataccataaatatatttctaaggtatttgaacatgtagatttatcggaggaattaagtatggaattccatgatacaactctgagagatttagtctatcttagattgtacaagtattccaagtatatacggccgtgttataaattaggagataatctaaaaggtatagttgttataaaggacagaaatatatatattagagaagcaaatgatgacttgatagaatatctcctcaaggaatacactcctcagatttatacatattctaatgagcgcgtccccatagctggttcaaaattaattctttgcggattttctcaagttacatttatggcgtatacaacgtcgcatataacaacaaataaaaaggtagatgttctcgtttccaaaaaatgtatagatgaactagtcgatccaataaattatcaaatacttcaaaatttatttgataaaggaagtggaacaataaacaaaatactcaggaagatattttattcggtaacaggtggccaaactccataggtagctttttctatttcggattttagaatttccaaattcaccagcgatttatcggttttggtgaaatccaaggatttattaatgtccacaaatgccatttgttttgtctgtggattgtatttgaaaatggaaacgatgtagttagatagatgcgctgcaaagtttcctattagggttccgcgctttacgtcacccaacatacttgaagcaccatcctttaaaaaaaatgataagatatcaacatggagtatatcatactcggattttaattcttctactgcctcactgacattttcacaaatactacaatacggtttaccgaaaataatcagtacgttcttcatttatgggtatcaaaaacttaaaatcgttactgctggaaaataaatcactgacgatattagatgataatttatacaaagtatacaatggaatatttgtggatacaatgagtatttatatagccgtcgccaattgtgtcagaaacttagaagagttaactactgtattcataaaatacgtaaacggatgggtaaaaaagggagggcatgtaaccctttttatcgatagaggaagtataaaaattaaacaagacgttagagacaagagacgtaaatattctaaattaaccaaggacagaaaaatgctagaattagaaaagtatacatcagaaatacaaaatgttaccggatttatggaagaagaaataaaggcagaaatgcaattaaaaatcgataaactcacatttcaaatatatttatctgattctgataacataaaaatatcattgaatgagatactaacacatttcaacaataatgagaatgttacattattttattgtgatgaacgagacgcagaattcgttatgtgtctcgaggctaaaacacatttctctaccacaggagaatggccgttgataataagtaccgatcaggatactatgctattcgcgtctgctgataatcatcccaagatgataaaaaacttaactcatctgtttaaatttgttccctcggcagaggataactatttagcaaaattaacggcgttagtgaatggatgtgatttctttcctggactctatggggcatctataacacccaccaacttaaacaaaatacaattgtttagcgattttacaatcgataatatagtcactagtttggcaattaaaaattattatagaaagactaactctaccgtagacgtgcgtaatattgttacgtttataaatgattacgctaatttagacgatgtctactcgtatgttcctccttgtcaatgcactgttcaagaatttatattctccgcattagatgaaaaatggaacgattttaaatcatcttatttagagagcgtgccattaccctgtcaattaatgtacgcgttagaaccacgtaaggagattgatgtttcagaagttaaaactttatcatcttatatagatttcgaaaatactaaattagatatcgatgttataaaatctatatcctcgatttttggatattctaacgaaaactgtaacacgatagtgttcggcatctataaggataatttactactgagtataaatagttcattttactttaacgatagtctgttaataaccaatactaaaagtgataatataataaatataggttactagattaaaaatggtgttccaactcgtctgctctacatgtggcaaagatatttctcatgaacgatataaattgattatacgaaaaaaatcattaaaggatgtactagtcagtgtaaagaacgaatgttgtaggttaaaattatctacacaaatagaacctcaacgtaacttaacagtgcaacctctattggatataaactaatatggatatggatccggttaattttatcaagacatatgcgcctagaggttctattatttttattaattatgccatatcattaactagtcatttgaatccatcgatagaaaaacatgtgggtatttattatggtacgttattatcggaacacctggtagttgaatcgacctatagaaaaggagttagaatagtcccattggatagtttttttgaaggatatattagtgcaaaagtatacatgttagagaatattcaagttatgaaaatagcagctgatacgtcattaactttactgggtattccatatggattcggtcatgatagaatgtattgttttaaattggtagctgaatgttataaaaatgccggtgttgatatatcgtctacacgaatattgggcaaagatatttttttgagccaaaacttcacagatgataatagatggataaagatatatgattctaataatttaacactttggcaaattgattaccttaaagggtgagttaatatgcataactactcctccgttattttttccctcgttctttttcttaacgttgtttgccatcactctcataatgtaaagatattctaaaatggtaaacttttgcatatcggacgcagaaattggtataaatgatgtaattgtattatttcccgtcaatggactagtcacggctccatcagttttatatcctttagagtatttctcactagtgtctagcattctagagcattccatgatctgtttatcgttgatattggccggaaagatagattttttattttttattatattactattggcaattgtagatataacttctggtaaatatttttctaccttttcaatctcttctattttcaagccggctatatattctgctatattgttgctagtatcaataccttttctggctaagaagtcatatgtggtattcactatatcagttttaactggtagttccattagcctttccacttctgcagaataatcagaaattggttctttaccagaaaatccagctactataataggctcaccgatgatcattggcaaaatcctatattgtaccagattaatgagagcatatttcatttccaataattctgctagttcttgagacattgatttatttgaggaatctagttggttctctagatactctaccatttctgccgcatacaataacttgttagataaaatcaatgttatcaaagtgtttaacgtggctagaatagtgggtttgcacgtattaaagaatgcggtagtatgcgtaaaccgttttaacgaattatatagtctccagaaatctgtggcgttacatacgtgagccgaatgacatcgaagattgtccaatatttttaatagctgctctttgtccattatttctatatttgactcgcaacaattgtagataccattaatcaccgattcttttttcgatgccggacaatagcacaattgtttagctttggactctatgtattcagaattaatagatatatctctcaatacagattgcactatacattttgaaactatgtcaaaaattgtagaacgacgctgttctgcagccatttaactttaaataatttacaaaaatttaaaatgagcatccgtataaaaatcgataaactgcgccaaattgtggcatatttttcagagttcagtgaagaagtgtctataaatgtagactcgacggatgagttaatgtatatttttgccgccttgggcggatctgtaaacatttgggctattatacctctcagtgcatcagtgttctaccgtggagccgaaaacattgtgtttaatcttccggtgtccaaggtaaaatcgtgtttgtgtagttttcacaatgatgccatcatagatatagaacccgatctggaaaataatctagtaaaactttccagttatcatgtagtaagtgtcgattgtaataaggaactgatgcctattaggacagatactactatttgtctaagtatagatcaaaagaaatcttacgtgtttaattttcacaagtatgaagaaaaatgttgtggtagaaccgtcattcatctagaatggttgttgggctttatcaagtgtattagtcagcatcagcatttggctattatgtttaaagatgacaatattattatgaggactcctggtaatactgatgcattttccagggaatattctatgactgaatgttctcaagaacttcaaaagttttctttcaaaatagctatctcgtctctcaacaaactacgaggattcaaaaagagagtcaatgtttttgaaactagaatcgtaatggataatgacgataacattctaggaatgttgttttctgacagagttcaatcctttaagattaacatctttatggcgtttttagactaatactttcaacgagataaatatgggtggtggagtaagcgttgcgctccctaaacgggatccgcctccgggagtacccactgacgaaatgttattaaacgtggataaaatgcatgacgtgatagctcctgctaagcttttagaatatgtgcatataggaccgctagcaaaagataaagaggataaagtaaagaaaagatatccagagtttagattagtcagcacaggacccggtaatctttcggcattattaagacaatcgtataatggaaccgcacccaattgctgtcgcacttttaaccgtactcattattggaagaaggatggaaagatatccgataagtatgaagatggtgcagtattagaatcgtgttggcccgacgtccacgacactggaaaatgcgatgttgatttattcgactggtgtcagggggatacgttcgatagaaacatatgccatcaatggatcggttcagcatttaataggagtgatagaacggcagagggtcaacaatcgttaataaatctgtacaataagatgcaaacattatgtactaaagatgctagtgtgccaatatgtgaatcatttttgcatcatttacgcgcacacaatacagaagatagccaagagatgatcgactatattttaagacaacagtccgcagattttaagcagaaatatatgagatgtagttatcccaccagagataagttagaagagtcactaaaatatgcggaacctcgagaatgttgggatccagagtgttcgaatgccaatgttaatttcttgctaacacgtaattataataatttagggctatgcaatattgtacgatgtaataccagcgtgaacaacttacagatggataaaacttcctcattaagattatcctgtggattaagcaatagtgatagattttctactgttcccgtcaatagagcaaaagtagttcaacataatattaaacattcgttcgacctaaaattgcatttgatcagtttattatctctcttggtaatatggatactaattgtagctatttaaatgggcgccgcggcaagcatacaaacgacggtgaatacactcagcgaacgtatctcgtctaaattagaacaagaagcgaacgctagtgctcaaacaaaatgtgatatagaaattggaaatttttatatccgacaaaaccatggatgtaacctcactgttaaaaatatgtgctccgcggacgcggatgctcagttggatgctgtgttatcagccgctacagaaacatatagtagtttaacaccggaacaaaaagcatacgtacctgctatgtttactgccgcgttaaacattcaaacgagtgtaaacactgttgttagagattttgaaaattatgtgaagcagacttgtaattctagcgcggtcgtcgataacaaattaaagatacaaaacgtaattatagatgaatgttatggagccccaggatcaccaacaaatttggaatttattaatacaggatctagcaaaggaaattgtgccattaaggcgttgatgcaattgacgactaaggccactactcaaatagcacctagacaagttgctggttcaggagttcaattttatatgatagttatcggtgttataatattggcagcgttgtttatgtactatgccaagcgtatgctattcacatccaccaatgataaaatcaaacttattttagcaaataaggaaaacgtccattggactacttacatggacacattctttagaacttctccgatggttatcgctaccacggatatacaaaactgaaaatatattgataatattttaatagattaacatggaagttatcgctgatcgtctagacgatatagtggaacaaaatatagcggatgaaaaatttgtagattttgttatacacggtctactagaacatcaatgtccctccatacttcggccattacttaggttgttgattgatatactattatttgttatagtaatttatatttttacggtacgtctggtacgtagaaattatcaaatgttgttggtgttggtggcgctagtcatcgcgttaactattttttattactttatactataatagtactagactgacttctaacaaacatctcacctgccataaataaattcttgatattaaagtcttctatttctaacactattccatctgtggaaaataatactctgacattatcgctaattgacacatcggtgagtgatatgcctataaagtaataatcttctttgggcacatataccagtgtaccaggttctaacaacctatttactggtgctccagtagcatactttttctttaccttaagaatatccatcgtttgcttagtcaatagcgataggtgattttttatcaaccactcgaaaaagtaattggagtgttcatatcctctacgggctattgtctcatgtccgtgtatgaaatttaagtaacacgactgtggtagatttgttctatagagccggttgccgcaaatagatagaactaccaatacatctgtacaaatgttaaacattaattgattaacagaaaaaacaatgttcgttctgggaatagaaaccagatcaaaacaaaattcgttagaatatatgccacgtttatacattgaatataaaataactacagtttgaaaaataacagtatcatttaaacatttaacttgcggggttaatctcacaactttactgtttttgaactgttcaaaatatagcatagatccatgagaaatacgtttagccgcctttaatagaggaaatcccaccgcctttctggatctcaccaacgacgatagttctgaccagcaactcatttcttcatcatccacctgttttaacatataataggcaggagatagatatccgtcattgcaatattccttctcgtaggcacacaatctaatattgataaaatctccattctcttctctgcatttattatcttgtttcggtggctgattaggctgtagtcttggtttaggctttggtatatcgttgttgaatctattttggtcattaaatctttcatttcttcctggtatatttttatcacctcgtttggttggatttttgtctatattatcgtttgtaacatcggtacgggtattcatttatcacaaaaaaaacttctctaaatgagtctactgctagaaaaccttatcgaagaagataccatattttttgcaggaagtatatctgagtatgatgatttacaaatggttattgccggcgcaaaatccaaatttccaagatctatgctttctatttttaatatagtacctagaacgatgtcaaaatatgagttggagttgattcataacgaaaatatcacaggagcaatgtttaccacaatgtataatataagaaacaatttgggtctaggagatgataaactaactattgaagccattgaaaactatttcttggatcctaacaatgaggttatgcctcttatcattaataatacggatatgactgccgtcattcctaaaaaaagtggtaggagaaagaataagaacatggttattttccgtcaaggatcatcacctatcttgtgtattttcgaaactcgtaaaaagattaatatttataaagaaaatatggaatccgcgtcgactgagtatacacctatcggagacaacaaggctttgatatctaaatatgcgggaattaatgtcctgaatgtgtattctccttccacatccatgagattgaatgccatttacggattcaccaataaaaataaactagagaaacttagtactaataaggaactagaatcgtatagttctagccctcttcaagaacccattaggttaaatgattttctgggactattggaatgtgttaaaaagaatattcctctaacagatattccgacaaaggattgattactataaatggagaatgttcctaatgtatactttaatcctgtgtttatagagcccacgtttaaacattctttattaagtgtttataaacacagattaatagttttatttgaagtattcgttgtattcattctaatatatgtattttttagatctgaattaaatatgttcttcatgcctaaacgaaaaatacccgatcctattgatagattacgacgtgctaatctagcgtgtgaagacgataaattaatgatctatggattaccatggatgacaactcaaacatctgcgttatcaataaatagtaaaccgatagtgtataaagattgtgcaaagcttttgcgatcaataaatggatcacaaccagtatctcttaacgatgttcttcgcagatgatgattcattttttaagtatttggctagtcaagatgatgaatcttcattatctgatatattgcaaatcactcaatatctagactttctgttattattattgatccaatcaaaaaataaattagaagccgtgggtcattgttatgaatctctttcagaggaatacagacaattgacaaaattcacagactctcaagattttaaaaaactgtttaacaaggtccctattgttacagatggaagggtcaaacttaataaaggatatttgttcgactttgtgattagtttgatgcgattcaaaaaagaatcctctctagctaccaccgcaatagatcctgttagatacatagatcctcgtcgcaatatcgcattttctaacgtgatggatatattaaagtcgaataaagtgaacaataattaattctttattgtcatcatgaacggcggacatattcagttgataatcggccccatgttttcaggtaaaagtacagaattaattagacgagttagacgttatcaaatagctcaatataaatgcgtgactataaaatattctaacgataatagatacggaacgggactatggacgcatgataagaataattttgaagcattggaagcaactaaactatgtgatgtcttggaatcaattacagatttctccgtgataggtatcgatgaaggacagttctttccagacattgttgaattctgtgagcgtatggcaaacgaaggaaaaatagttatagtagccgcactcgatgggacatttcaacgtaaaccgtttaataatattttgaatcttattccattatctgaaatggtggtaaaactaactgctgtgtgtatgaaatgctttaaggaggcttccttttctaaacgattgggtgaggaaaccgagatagagataataggaggtaatgatatgtatcaatcggtgtgtagaaagtgttacatcgactcataatattatattttttatctaaaaaactaaaaataaacattgattaaattttaatataatacttaaaaatggatgttgtgtcgttagataaaccgtttatgtattttgaggaaattgataatgagttagattacgaaccagaaagtgcaaatgaggtcgcaaaaaaactaccgtatcaaggacagttaaaactattactaggagaattattttttcttagtaagttacagcgacacggtatattagatggtgccaccgtagtgtatataggatctgctcccggtacacatatacgttatttgagagatcatttctataatttaggagtgatcatcaaatggatgctaattgacggccgccatcatgatcctattttaaatggattgcgtgatgtgactctagtgactcggttcgttgatgaggaatatctacgatccatcaaaaaacaactgcatccttctaagattattttaatttctgatgtgagatccaaacgaggaggaaatgaacctagtacggcggatttactaagtaattacgctctacaaaatgtcatgattagtattttaaaccccgtggcatctagtcttaaatggagatgcccgtttccagatcaatggatcaaggacttttatatcccacacggtaataaaatgttacaaccttttgctccttcatattcagctgaaatgagattattaagtatttataccggtgagaacatgagactgactcgagttaccaaattagacgctgtaaattatgaaaaaaagatgtactaccttaataagatcgtccgtaacaaagtagttgttaactttgattatcctaatcaggaatatgactattttcacatgtactttatgctgaggaccgtgtactgcaataaaacatttcctactactaaagcaaaggtactatttctacaacaatctatatttcgtttcttaaatattccaacaacatcaactgaaaaagttagtcatgaaccaatacaacgtaaagtatctagcaaagattttatgtctaaaaacagaaatagcaagagatccgtacgcagtaataaatagaaacgtactactgagatatactaccgatatagagtataatgatttagttactttaataaccgttagacataaaattgattctatgaaaactgtgtttcaggtatttaacgaatcatctataaattatactccggttgatgatgattatggagaaccaatcattataacatcgtatcttcaaaaaggtcataacaagtttcctgtaaattttctatacatagatgtggtaatatctgacttatttcctagctttgttagactagatactacagaaactaatatagttaatagtgtactacaaacaggcgatggtaaaaagactcttcgtcttcccaaaatgttagagacggaaatagttgtcaagattctctatcgtcctaatataccattaaaaattgttagatttttccgcaataacatggtaactggagtagagatagcagatagatctgttatttcagtcgctgattaatcaattaatagagatgagataagaacattataataatcaataatatatcttatatcttgtttagaaaaatgccaatattaaaatagctaacgctagtaatccaatcggaagccatttgatatctataatagggtatctaatttcctgattcagatagcggacagctatattctcggtagctactcgtttggaatcacaaacattatttacatctaatttactatctgtaatggaaacgtttcccaatgaaatggtacaatccgatacattgcatcttgatatatttttttttaaagaggctggtaacaacgcatcgcttcgtttacatggctcgtaccaacaataatagggtaatcttgtatctattcctatccgtactatgcttttatcaggatgaatacatttacatcgtatatcgtctttgttagcatcgcagaatgcataaatttgctcgtccgtcatgataaaaatttaaagtgtaaatataactattatttttatagttgtaataaaaagggaaatttgattgtataccttcggttctttaaaagaaactgacttgataaaaatggctgtaatctctaaggttacgtatagtctatatgatcaaaaagagattaatgctacagatattatcattagtcatgttaaaaatgacgacgatatcggtaccgttaaagatggtagactaggtgctatggatggggcattatgtaaaacttgtgggaaaacggaattggaatgtttcggtcactggggtaaagtaagtatttataaaactcatatagttaagcctgaatttatttcagaaattattcgtttactgaattatatatgtattcactgcggattattgcgttcacgagaaccgtattccgacgatattaacctaaaagagttatcgggacacgctcttaggagattaaaggataaaatattatccaagaaaaagtcatgttggaacagtgaatgtatgcaaccgtatcaaaaaattactttttcaaagaaaaaggtttgtttcgtcaacaagttggatgatattaacgttcctaattctctcatctatcaaaagttaatttctattcatgaaaagttttggccattattagaaattcatcaatatccagctaacttattttatacagactactttcccatccctccgttgattattagaccggctattagtttttggatagatagtatacccaaagaaaccaatgaattaacttacttattaggtatgatcgttaagaattgtaacttgaatgctgatgaacaggttatccagaaggcggtaatagaatacgatgatattaaaattatttctaataacactaccagtatcaatttatcatatatcacatccggcaaaaataatatgattagaagttatatcgtcgcccggcgaaaagatcagaccgctagatctgtaattggtcccagtacatctatcaccgttaatgaggtaggaatgcccgcatatattagaaatacacttacagaaaagatatttgttaatgcctttacagtggataaagttaaacaactattagcatcaaaccaagttaaattttactttaataaacgattaaaccaattaacaagaatacgccaaggaaagtttatcaaaaataaaatacatttattgcctggtgattgggtagaagtagctgttcaagaatatacaagtattatttttggaagacagccgtctctacatagatacaacgtcatcgcttcatctatcagagctaccgaaggagatactatcaaaatatctcccggaattgccaactctcaaaatgctgatttcgacggggatgaggaatggatgatattagaacaaaatcctaaagctgtaattgaacaaagtattcttatgtatccgacgacgttactcaaacacgatattcatggagcccctgtttatggatctattcaagatgaaatcgtagcagcgtattcattgtttaggatacaagatctttgtttagatgaagtattgaacatcttggggaaatatggaagagagttcgatcctaaaggtaaatgtaaattcagcggtaaagatatctatacttacttgataggtgaaaagattaattatccgggtctcttaaaggatggtgaaattattgcaaacgacgtagatagtaattttgttgtggctatgaggcatctgtcattggctggactcttatccgatcataagtcgaacgtggaaggtatcaactttattatcaagtcatcttatgtttttaagagatatctatctatttacggttttggggtgacattcaaagatctgagaccaaattcgacgttcactaataaattggaggccatcaacgtagaaaaaatagaacttatcaaagaagcatacgccaaatatctcaaagatgtaagagacgggaaaatagttccattatctaaagctttagaggcggactacgtggaatccatgttatccaacttgacaaatcttaatatccgagagatagaagaacatatgagacaaacgctgatagatgatccagataataacctcctgaaaatggccaaagcgggttataaagtaaatcccacagaactaatgtatattctaggtacttatggacaacagaggattgatggtgaaccagcagagactcgagtattgggtagagtcttaccttactatcttccagactctaaggatccagaaggaagaggttatattcttaattctttaacaaaaggattaacaggttctcaatattacttttcgatgctggttgcaagatctcaatctactgatatcgtctgtgaaacatcacgtaccggaacactggctagaaaaatcattaaaaagatggaggatatggtggtcgacggatacggacaagtagttataggtaatacgctcatcaagtacgccgccaattataccaaaattctaggctcagtatgtaaacctgtagatcttatctatccagatgagtccatgacttggtatttggaaattagtgctctgtggaataaaataaaacagggattcgtttactctcagaaacagaaacttgcaaaaaagacattggcgccgtttaatttcctagtattcgtcaaacccaccactgaggataatgctattaaggttaaggatctgtacgatatgattcataacgtcattgatgatgtgagagagaaatacttctttacggtatctaatatagattttatggagtatatattcttgacgcatcttaatccttctagaattagaattacaaaagaaacggctatcactatctttgaaaagttctatgaaaaactcaattatactctaggtggtggaactcctattggaattatttctgcacaggtattgtctgagaagtttacacaacaagccctgtccagttttcacactactgaaaaaagtggtgccgtcaaacaaaaacttggtttcaacgagtttaataacttgactaatttgagtaagaataagaccgaaattatcactctggtatccgatgatatctctaaacttcaatctgttaagattaatttcgaatttgtatgtttgggagaattaaatccaaacatcactcttcgaaaagaaacagataaatatgtagtagatataatagttaatagattatacatcaagagagcagaaataaccgaattagttgtcgaatatatgattgaacgatttatctcctttagcgtcattgtaaaggaatggggtatggagacattcattgaggacgaggataatattagatttactgtctatctaaatttcgttgaaccagaggaattgaatcttagtaagtttatgatggttcttccgggggcagccaacaagggaaagattagtaaattcaagattcctatctctgactatacgggatatgacgacttcaatcaaacaaaaaagctcaataagatgactgtagaactcatgaatctaaaagaattaggttctttcgatttggaaaacgtcaacgtgtatcctggagtatggaatacatacgatatcttcggtatcgaggccgctcgtgaatacttgtgcgaagccatgttaaacacctatggagaagggttcgattatctgtatcagccttgtgatcttctcgctagtttactatgtgctagttacgaaccagaatcagtgaataaattcaagttcggcgcagctagtactcttaagagagctacgttcggagacaataaagcattgttaaacgcggctcttcataaaaagtcagaacctattaacgataatagtagctgccacttttttagcaaggtccctaatataggaactggatattacaaatactttatcgacttgggtcttctcatgagaatggaaaggaaactatctgataagatatcttctcaaaagatcaaggaaatggaagaaacagaagacttttaattcttatcaataacatatttttctatgatctgtcttttaaacgatggattttccacaaatgcgcctctcaagtccctcatagaatgatacacgtataaaaaatatagcataggcaatgactccttatttttagacattagatatgccaaaatcatagccccgcttctatttactcccgcagcacaatgaaccaacacgggctcgtttcgttgatcacatttagataaaaaggcggttacgtcgtcaaaatatttactaatatcggtagttgtatcatctaccaacggtatatgaataatattaatattagagttaggtaatgtatatttatccatcgtcaaatttaaaacatatttgaacttaacttcagatgatggtgcatccatagcatttttataatttcccaaatacacattattggttacccttgtcattatagtgggagatttggctctgtgcatatctccagttgaacgtagtagtaagtatttatacaaacttttcttatccatttataacgtacaaatggataaaactactttatcggtaaacgcgtgtaatttagaatacgttagagaaaaggctatagtaggcgtacaagcagccaaaacatcaacacttatattctttgttattatattggcaattagtgcgctattactctggtttcagacgtctgataatccagtctttaatgaattaacgagatatatgcgaattaaaaatacggttaacgattggaaatcattaacggatagcaaaacaaaattagaaagtgatagaggtagacttctagccgctggtaaggatgatatattcgaattcaaatgtgtggatttcggcgcctattttatagctatgcgattggataagaaaacatatctgccgcaagctattaggcgaggtactggagacgcgtggatggttaaaaaggcggcaaaggtcgatccatctgctcaacaattttgtcagtatttgataaaacacaagtctaataatgttattacttgtggtaatgagatgttaaatgaattaggttatagcggttattttatgtcaccgcattggtgttccgattttagtaatatggaatagtgttagataaatgcggtaacgaatgttcctgtaaggaaccataacagcttagatttaacgttaaagatgagcataaacataataaacaaaattacaatcaaacctataacattaatatcaaacaatccaaaaaatgaaatcagtggagtagtaaacgcgtacataactcctggataacgtttagcagctgccgttcctattctagaccaaaaattcggtttcatgttttcgaagcggtgttctgcaacaagtcggggatcgtgttctacatatttggcggcgttatccagtatctgcctattgatcttcatttcgttttcgattctggctatttcaaaataaaatcccgatgatagacctccagactttataatttcatctacaatgttcagcgccgtagtaactctaataatataggctgataagctaacatcataccctcctgtatatgtgaatatggcatgatttttgtccattacaagctcggttttaactttattgcctgtaataatttctctcatctgtaggatatctatttttttgtcatgcattgccttcaagacgggacgaagaaacgtaatatcctcaataacgttatcgttttctacaataactacatattctacctttttattttctaactcggtaaaaaaattagaatcccatagggctaaatgtctagcgatatttcttttcgtttcctctgtacacatagtgttacaaaaccctgaaaagaagtgagtatacttgtcatcatttctaatgtttcctccagtccactgtataaacgcataatccttgtaatgatctggatcatccttgactaccacaacatctcttttttctggcataacttcgttgtcctttacatcatcgaacttctgatcattaatatgctcatgaacattaggaaatgtttctgatggaggtctatcaataactggcacaacaataacaggagttttcaccgccgccatttagttattgaaattaatcatatacaactctttaatacgagttatattttcgtctatccattgtttcacatttacatatttcgacaaaaagatataaaatgcgtattccaatgcttctctgtttaatgaattactaaaatatacaaacacgtcactgtctggcaataaatgatatcttagaatattgtaacaatttattttgtattgcacatgttcgtgatctatgagttcttcttcgaatggcataggatctccgaatctgaaaacgtataaataggagttagaataataatatttgagagtattggtaatatataaactctttagcggtataattagtttttttctctcaatttctatttttagatgtgatggaaaaatgactaattttgtagcattagtatcatgaactctaatcaaaatcttaatatcttcgtcacacgttagctctttgaagtttttaagagatgcatcagttggttctacagatggagtaggtgcaacaattttttgttctacacatgtatgtactggagccattgttttaactataatggtgcttgtatcgaaaaactttaatgcagatagcggaagctcttcgccgcgactttctacatcgtaattgggttctaacgccgatctctgaatggatactagttttctaagttctaatgtgattctctgaaaatgtaaatccaattcctccggcattatagatgtgtatacatcggtaaataaaactatagtatccaacgatcccttctcgcaaattctagtcttaaccaaaaaatcgtatataaccacggagatggcgtatttaagagtggattcttctaccgttttgttcttggatttcatataagaaactataaagtccgcactactgttaagaatgattactaacgcaactatatagtttaaattaagcatcttggaaacataaaataactctgtagacgatacttgactttcgaataagtttgcagacaaacgaagaaagaacagacctctcttaatttcagaagaaaactttttttcgtattcctgacgtctagagtttatatcaataagaaagttaagaattagtcggttaatgttgtatttcattacccaagtttgagatttcataatattatcaaaagacatgataatattaaagataaagcgctgactatgaacgaaatagctatatggttcgctcaaaaatatagtcttgttaaacgtggaaacgataactgtatttttaatcacgtcagcggcatctaaattaaatataggtatatttattccacacactctacaatatgccacaccatcttcataataaataaattcgttagcaaagttattaattttagtgaaatagttagcgtcaactttcatagcttccttcaatctaatttgatgctcacacggtgcgaattccactctaacatcccttttccatgcctcaggttcatcgatctctataatatctagttttttgcgtttcacaaacacaggctcgtctctcgcgatgagatctgtatagtaactatgtaaatgataactagatagaaagatgtagctatatagatgacgatcctttaagagaggtataataactttaccccaatcagatagactgttgttatggtcttcggaaaaagaatttttataaatttttccagtattttccaaatatacgtacttgacatctaaaaaatccttaatgataataggaatggataatccgtctattttataaagaaatacatatcgcacattatacttttttttggaaatgggaataccgatgtgtctacataaatatgcaaagtctaaatattttttagagaatcttaattggtccaaattcttttccaagtacggtaatagatttttcatattgaacggtatcttcttaatctctggttctagttccgcattaaatgatgaaactaagtcactatttttataactaacgattacatcacctctaacatcatcatttaccagaatactgatcttcttttgtcgtaaatacatgtctaatgtgttaaaaaaaagatcatacaagttatacgtcatttcatctgtggtattcttgtcattgaaggataaactcgtactaatctcttctttaacagcctgttcaaatttatatcctatatacgaaaaaatagcaaccagtgtttgatcatccgcgtcaatattctgttctatcgtagtgtataacaatcgtatatcttcttctgtgatagtcgatacgttataaaggttgataacgaaaatatttttatttcgtgaaataaagtcatcgtaggattttggacttatattcgcgtctagtagatatgcttttatttttggaatgatctcaattagaatagtctctttagagtccatttaaagttacaaacaactaggaaattggtttatgatgtataatttttttagtttttatagattctttattctatacttaaaaaatgaaaataaatacaaaggttcttgagggttgtgttaaattgaaagcgagaaataatcataaattatttcattatcgcgatatccgttaagtttgtatcgtaatggcgtggtcaattacaaataaagcggatactagtagcttcacaaagatggctgaaatcagagctcatctaaaaaatagcgctgaaaataaagataaaaacgaggatattttcccggaagatgtaataattccatctactaagcccaaaaccaaacgagccactactcctcgtaaaccagcggctactaaaagatcaaccaaaaaggaggaagtggaagaagaagtagttatagaggaatatcatcaaacaactgaaaaaaattctccatctcctggagtcagcgacattgtagaaagcgtggccgctgtagagctcgatgatagcgacggggatgatgaacctatggtacaagttgaagctggtaaagtaaatcatagtgctagaagcgatctttctgacctaaaggtggctaccgacaatatcgttaaagatcttaagaaaattattactagaatctctgcagtatcgacggttctagaggatgttcaagcagctggtatctctagacaatttacttctatgactaaagctattacaacactatctgatctagtcaccgagggaaaatctaaagttgttcgtaaaaaagttaaaacttgtaagaagtaaatgcgtgcacttttttataaagatggtaaactctttaccgataataattttttaaatcctgtatcagacgataatccagcgtatgaggttttgcaacatgttaaaattcctactcatttaacagatgtagtagtatatgaacaaacgtgggaggaggcgttaactagattaatttttgtgggaagcgattcaaaaggacgtagacaatacttttacggaaaaatgcatgtacagaatcgcaacgctaaaagagatcgtatttttgttagagtatataacgttatgaaacgaattaattgttttataaacaaaaatataaagaaatcgtccacagattccaattatcagttggcggtttttatgttaatggaaactatgttttttattagatttggtaaaatgaaatatcttaaggagaatgaaacagtagggttattaacactaaaaaataaacacatagaaataagtcccgatgaaatagttatcaagtttgtaggaaaggacaaagtttcacatgaatttgttgttcataagtctaatagactatataaaccgctattgaaactgacggatgattctagtcccgaagaatttctgttcaacaaactaagtgaacgaaaggtatacgaatgtatcaaacagtttggtattagaatcaaggatctccgaacgtatggagtcaattatacgtttttatataatttttggacaaatgtaaagtccatatctcctcttccatcaccaaaaaagttaatagcgttaactatcaaacaaactgctgaagtggtaggtcatactccatcaatttcaaaaagagcttacatggcaacgactattttagaaatggtaaaggataaaaattttttagatgtagtatctaaaactacgttcgatgaattcctatctatagtcgtagatcacgttaaatcatctacggatggatgatatagatctttacacaaataattacaagaccgataaatggaaatggataagcgtatgaaatctctcgcaatgaccgctttctttggggagctaagcacattagatattatggcattgataatgtctatatttaaacgccatccaaacaataccattttttcagtggataaggatggtcagtttatgattgatttcgaatacgataattataaggcttctcaatatttggatctgaccctcactccgatatttggagatgaatgcaagactcacgcatcgagtatagccgaacaattggcgtgtgcggatattattaaagaggatattagcgaatacatcaaaactactccccgtcttaaacgatttataaaaaaataccgcaatagatcagatactcgcatcagtcgagatacagaaaagcttaaaatagctctagctaaaggcatagattacgaatatataaaagacgcttgttaataagtaaatgaaaaaaaactagtcgtttataataaaacacaatatggatgccaacatagtatcatcttctactattgcaacgtatatagacgctttagcgaagaatgcttcagaattagaacagaggtctaccgcatacgaaataaataatgaattggaactagtatttattaagccgccattaattactttgacaaatgtagtgaatatctctacgattcaggaatcgtttattcgatttaccgttactaataaggaaggtgttaaaattagaactaagattccattatctaaggtacatggtctagatgtaaaaaatgtacagttagtagatgctatagataacatagtttgggaaaagaaatcattagtgacggaaaatcgtcttcacaaagaatgcttgttgagactatcgacagaggaacgtcatatatttttggattacaagaaatatggatcctctatccgactagaattagtcaatcttattcaagcaaaaacaaaaaactttacgatagactttaagctaaaatattttctaggatccggtgcccaatctaaaagttctttgttgcacgctattaatcatccaaagtcaaggcctaatacatctctggaaatagaattcacacctagagacaatgaaaaagttccatatgatgaactaataaaggaattgacgactctatcacgtcatatatttatggcttctccagagaatgtaattctttctccgcctattaacgcacctataaagacttttatgttgcctaaacaagatatagtaggtctggatctggaaaatctatatgccgtaactaagactgacggcattcctataactatcagagttacatcaaacgggttgtattgttattttacacatcttggttatattattagatatcctgttaagagaataatagattccgaagtagtagtctttggtgaggcagttaaggataagaactggaccgtatatctcattaagctaatagagcctgtgaatgcaatcaatgatagactagaagaaagtaagtatgttgaatctaaactagtggatatttgtgatcggatagtattcaagtcaaagaaatatgaaggtccgtttactacaactagtgaagtcgtcgatatgttatctacatatttaccaaagcaaccagaaggtgttattctgttctattcaaagggacctaaatctaacattgattttaaaattaaaaaggaaaatactatagaccaaactgcaaatgtagtatttaggtacatgtccagtgaaccaattatctttggagaatcgtctatctttgtagagtataagaaatttagcaacgataaaggctttcctaaagaatatggttctggtaagattgtgttatataacggcgttaattatctaaataatatctattgtttggaatatattaatacacataatgaagtgggtattaagtccgtggttgtacctattaagtttatagcagaattcttagttaatggagaaatacttaaacctagaattgataaaaccatgaaatatattaactcagaagattattatggaaatcaacataatatcatagttgaacatttaagagatcaaagcatcaaaataggagatatctttaacgaggataaactatcggatgtgggacatcaatacgccaataatgataaatttagattaaatccagaagttagttattttacgaataaacgaactagaggaccgttgggaattttatcaaactacgtcaagactcttcttatttctatgtattgttccaaaacatttttagacgattccaacaaacgaaaggtattggcgattgattttggaaacggtgcggacctggaaaaatacttttatggagagattgcgttattggtagcgacggatccggatgctgatgctatagctagaggaaatgaaagatacaacaaattaaactctggaattaaaaccaagtactacaaatttgactacattcaggaaactattcgatccgatacatttgtctctagtgtcagagaagtattctattttggaaagtttaatatcatcgactggcagtttgctatccattattcttttcatccgagacattatgctaccgtcatgaataacttatccgaactaactgcttctggaggcaaggtattaatcactaccatggacggagacaaattatcaaaattaacagataaaaagacttttataattcataagaatttacctagtagcgaaaactatatgtctgtagaaaaaatagctgatgatagaatagtggtatataatccatcaacaatgtctactccaatgactgaatacattatcaaaaagaacgatatagtcagagtgtttaacgaatacggatttgttcttgtagataacgttgatttcgctacaattatagaacgaagtaaaaagtttattaatggcgcatctacaatggaagatagaccgtctacaaaaaactttttcgaactaaatagaggagccattaaatgtgaaggtttagatgtcgaagacttacttagttactatgttgtttatgtcttttctaagcggtaaataataatatggtatgggttctgatatccccgttctaaatgcattaaataattccaatagagcgatttttgttcctataggaccttccaactgtggatactctgtattgttaatagatatattaatacttttgtcgggtaacagaggttctacgtcttctaaaaataaaagtttgataacatctggcctgttcataaataaaaacttggcgattctatatatactcttattatcaaatctagccattgtcttatagatgtgagctactgtaggtgtaccatttgattttctttctaatactatatatttctctcgaagaagttcttgcacatcatctgggaataaaatactactgttgagtaaatcagttattttttttatatcgatattgatggacatttttatagttaaggataataagtatcccaaagtcgataacgacgataacgaagtatttatacttttaggaaatcacaatgactttatcagatcaaaattaacaaaattaaaggagcatgtatttttttctgaatatattgtgactccagatacatatggatctttatgcgtcgaattaaatgggtctagttttcagcacggtggtagatatatagaggtggaggaatttatagatgctggaagacaagttagatggtgttctacatccaatcatatatctgaagatatgcacactgataaatttgtcatttatgatatttatacgtttgattcgttcaagaataaacgattggtatttgtacaggtgcctccatcattaggagatgatagctatttgactaatccgttattgtctccgtattatcgtaattcagtagccagacaaatggtcaatgatatgatttttaatcaagattcatttttaaaatatttattagaacatctgattagaagccactatagagtttctaaacatataacaatagttagatacaaggataccgaagaattaaatctaacgagaatatgttataatagagataagtttaaggcgtttgtattcgcttggtttaacggcgttttggaaaatgaaaaggtactagatacgtataaaaaggtatctaatttgatataatgaattcagtgactgtatcacacgcgccatatactattacttatcacgatgattggaaaccagtaatgagtcaattggtagagttttataacgaagtagccagttggctgctacgagacgagacgtcgcctattcctgataagttctttatacagttgaaacaaccgcttagaaataaacgagtatgtgtgtgcggtatagatccgtatccgaaagatggaactggtgtaccgttcgaatcaccaaattttacaaaaaaatcaattaaggagatagcttcatctatatctagattaaccggagtaattgattataaaggttataaccttaatataatagacggggttataccctggaattattacttaagttgtaaattaggagaaacaaaaagtcacgcgatctactgggataagatttccaagttactgctgcagcatataactaaacacgttagtgttctttattgtttgggtaaaacagatttctcgaatatacgggccaagttagaatccccggtaactaccatagtcggatatcatccagcggctagagaccgccaattcgagaaagatagatcatttgaaattatcaacgttttactggaattagacaacaaggcacctataaattgggctcaagggtttatttattaatgctttagtgaaattttaacttgtgttctaaatggatgcaactattagaggtaatgatgttatctttgttcttaagactataggtgtcccgtcagcgtgcagacaaaatgaagatccaagatttgtagaagcatttaaatgcgacgagttagaaagatatattgagaataatccagaatgtacactattcgaaagtcttagggatgaggaagcatactctatagtcagaattttcatggatgtagatttagacgcgtgtctagacgaaatagattatttaacggctattcaagattttattatcgaggtgtcaaactgtgtagctagattcgcgtttacagaatgcggtgccattcatgaaaatgtaataaaatccatgagatctaatttttcattgactaagtctacaaatagagataaaacaagttttcatattatctttttagacacgtataccactatggatacattgatagctatgaaacgaacactattagaattaagtagatcatctgaaaatccactaaccagatcgatagacactgccgtatataggagaaaaacaactcttcgggttgtaggtactaggaaaaatccaaattgcgacactattcatgtaatgcaaccaccgcatgataatatagaagattacctattcacttacgtggatatgaacaacaatagttattacttttctctacaacgacgattggaggatttagttcctgataagttatgggaaccagggtttatttcattcgaagacgctataaaaagagtttcaaaaatattcattaattctataataaactttaatgatctcgatgaaaataattttacaacggtaccactggtcatagattacgtaacaccttgtgcattatgtaaaaaacgatcgcataaacatccgcatcaactatcgttggaaaatggtgctattagaatttacaaaactggtaatccacatagttgtaaagttaaaattgttccgttggatggtaataaactgtttaatattgcacaaagaattttagacactaactctgttttattaaccgaacgaggagaccatatagtttggattaataattcatggaaatttaacagcgaagaacccttgataacaaaactaattctgtcaataagacatcaactacctaaggaatattcaagcgaattactctgtccgaggaaacgaaagactgtagaagctaacatacgagacatgttaatagattcagtggagaccgatacctatccggataaacttccgtttaaaaatggtgtattggacctggtagacggaatgttttactctggagatgatgctaaaaaatatacgtgtactgtatcaaccggatttaaatttgacgatacaaagttcgtcgaagacagtccagaaatggaagagttaatgaatatcattaacgatatccaaccattaacggatgaaaataagaaaaatagagagttgtacgaaaaaactttatctagttgtttatgcggtgctaccaaaggatgtttaacattcttttttggagaaactgcaactggaaagtcgacaaccaaacgtttgttaaagtctgctatcggtgacctgtttgttgagacgggtcaaacaattttaacagatgtattggataaaggacctaatccatttatcgctaacatgcatttgaaaagatctgtattctgtagcgaactacctgattttgcctgtagtggatcaaagaaaattagatctgacaatattaaaaagttgacagaaccttgtgtcattggaagaccgtgtttctccaataaaattaataatagaaaccatgcgacaatcattatcgatactaattacaaacctgtctttgataggatagataacgcattaatgagaagaattgccgtcgtgcgattcagaacacacttttctcaaccttctggtagagaggctgctgaaaataatgacgcgtacgataaagtcaaactattagacgaggggttagatggtaaaatacaaaataatagatatagattcgcatttctatacttgttggtgaaatggtacaaaaaatatcatgttcctattatgaaactatatcctacaccggaagagattccggactttgcattctatctcaaaataggtactctgttagtatctagctctgtaaagcatattccattaatgacggacctctccaaaaagggatatatattgtacgataatgtggttactcttccgttgactactttccaacagaaaatatccaagtattttaattctagactatttggacacgatatagagagcttcatcaatagacataagaaatttgccaatgttagtgatgaatatctgcaatatatattcatagaggatatttcatctccgtaaatatatgctcatatatttatagaagatatcacatatctaaatgaataccggaatcatagatttatttgataatcatgttgatagtataccaactatattacctcatcagttagctactctagattatctagttagaactatcatagatgagaacagaagcgtgttattgttccatattatgggatcaggtaaaacaataatcgctttgttgttcgccttggtagcttccagatttaaaaaggtttacattctagtgcctaatattaacattttgaaaattttcaattataatatgggtgtagctatgaacttgtttaatgacaaattcatagctgagaatatctttattcattccacaacaagtttttattctcttaattataacgataacgtcattaattataacggattatctcgctacaataactctatttttatcgttgatgaggcacataatatctttgggaataatactggagaacttatgaccgtgataaaaaataaaaacaagattccttttttactattgtctggatctcccattactaacacacctaatactctgggtcatattatagatttaatgtccgaagagacgatagattttggtgaaattattagtcgtggtaagaaagtaattcagacacttcttaacgaacgcggtgtgaatgtacttaaggatttgcttaaaggaagaatatcatattacgaaatgcctgataaagatctaccaacgataagatatcacggacgtaagtttctagatactagagtagtatattgtcacatgtctaaacttcaagagagagattatatgattactagacgacagctatgttatcatgaaatgtttgataaaaatatgtataacgtgtcaatggcagtattgggacaacttaatctgatgaataatttagatactttatttcaggaacaggataaggaattgtacccaaatctgaaaataaataatggcgtgttatacggagaagaattggtaacgttaaacattagttccaaatttaaatactttattaatcggatacagacactcaacggaaaacattttatatacttttctaattctacatatggcggattggtaattaaatatatcatgctcagtaatggatattctgaatataatggttctcagggaactaatccacatatgataaacggcaaaccaaaaacatttgctatcgttactagtaaaatgaaatcgtctttagaggatctattagatgtgtataattctcctgaaaacgatgatggcagtcaattgatgtttttgttttcgtcaaacattatgtccgaatcctatactctgaaagaggtaaggcatatttggtttatgactatcccagatactttttctcaatacaaccaaattcttggacgatctattagaaaattctcttacgccgatatttctgaaccagttaatgtatatcttttagccgccgtatattccgatttcaatgacgaagtgacgtcattaaacgattacacacaggatgaattgattaatgttttaccatttgacatcaaaaagctgttgtatctaaaatttaagactaaagaaacgaatagaatatactctattcttcaagagatgtctgaaacgtattctcttccaccacatccatcaattgtaaaagttttattgggagaattggtcagacaatttttttataataattctcgtattaagtataacgataccaagttacttaaaatggttacatcagttataaaaaataaagaagacgctaggaattacatagatgatattgtaaacggtcacttctttgtatcgaataaagtatttgataaatctcttttatacaaatacgaaaacgatattattacagtaccgtttagactttcctacgaaccatttgtttggggagttaactttcgtaaagaatataacgtggtatcttctccataaaactgatgagatatataaagaaataaatgtcgagctttgttaccaatggataccttccagttacattggagccacacgagctgacgttagacataaaaactaatattaggaatgccgtatataagacgtatctccatagagaaattagtggtaaaatggccaagaaaatagaaattcgtgaagacgtggaattacctctcggcgaaatagttaataattctgtagttataaacgttccgtgtgtaataacctacgcgtattatcacgttggggatatagtcagaggaacattaaacatcgaagatgaatcaaatgtaactattcaatgtggagatttaatctgtaaactaagtagagattcgggtactgtatcatttagcgattcaaagtactgcttttttcgaaatggtaatgcgtatgacaatggcagcgaagtcactgccgttctaatggaggctcaacaaggtatcgaatctagttttgtttttctcgcgaatatcgttgactcataaaaaagagaatagcggtaagtataaacacgaatactatggcaataattgcgaatgttttattcccttcgatatatttttgataatatgaaaaacatgtctctctcaaatcggacaaccatctcataaaatagttctcgcgcgctggagaggtagttgctgctcgtataatctccccagaataatatacttgcgtgtcgtcgttcaatttatacggatttctatagttctctgttatataatgcggttttccatcatgattagacgacgacaatagtgttctaaatttagatagttgatcagaatgaatgtttattggcgttggaaaaattatccatacagcgtctgcagagtggttgatagttgttcctagatatgtaaaataatccaacttactaggcagcaaattgtctagataaaatactgaatcaaacggtgcagacgtattggtggatctaatggaatccaattgattaactatcttttgaaaatatacatttttatgatccgatacttgtaagaatatagaaataatgataagtccatcatcgtgtttttttgcctcttcataagaactatattttttcttattccaatgaacaagattaatctctccagagtatttgtacacatctatcaagtgattggatccataatcgtcttcctttccccaatatatacgtagtgatgataacacatattcattggggagaaaccctccacttatatatcctcctttaaaattaatccttactagttttccagtgttctggatagtggttggtttcgactcattataatgtatgtctaacggcttcaatcgcgcgttagaaattgcttttttagtttctatattaataggagatagttgttgcggcatagtaaaaatgaaatgataactgtttaaaaatagctcttagtatgggaattacaatggatgaggaagtgatatttgaaactcctagagaattaatatctattaaacgaataaaagatattccaagatcaaaagacacgcatgtgtttgctgcgtgtataacaagtgacggatatccgttaataggagctagaagaacttcattcgcattccaagcgatattatctcaacaaaattcagattctatctttagagtatccactaaactattacggtttatgtactacaatgaactaagagaaatctttagacggttgagaaaaggttctatcaacgatatcgatcctcactttgaagagttaatattattgggtggtaaactagataaaaaggaatctattaaagattgtttaagaagagaattaaaagaggaaagtgatgaacgtataacagtaaaagaatttggaaatgtaattctaaaacttacaacacgggataaattatttaataaagtatatataagttattgcatggcgtgttttattaatcaatcgttggaggatttatcgcatactagtatttacaatgtagaaattagaaagattaaatcattaaatgattgtattaacgacgataaatacgaatatctgtcttatatttataatatgctagttaatagtaaatgaacttttacagatctagtataattagtcagattattaagtataatagacgactagctaagtctattatttgcgaggatgactctcaaattattacactcacggcattcgttaaccaatgcctatggtgtcataaacgagtatccgtgtccgctattttattaactactgataacaaaatattagtatgtaacagacgagatagttttctctattctgaaataattagaactagaaacatgtctagaaagaaacgattatttctgaattattccaattatttgtccaaacaggaaagaagtatactatcgtcatttttttctctagatccagctactactgataatgatagaatagatgctatttatccgggtggcatacccaaaaggggtgagaatgttccagagtgtttatccagggaaattaaagaagaagttaatatagacaattcttttgtattcatagacactcggttttttattcatggcatcatagaagataccattattaataaattttttgaggtaatcttctttgtcggaagaatatctttaacgagtgatcaaatcattgatacatttaaaagtaatcatgaaatcaaggatctaatatttttagatccgaattcaggtaatggactccaatacgaaattgcaaaatatgctctagatactgcaaaactcaaatgttatggccatagaggatgttattacgaatcattaaaaaaattaactgaggatgattgattagaaaatataaattaatttaccatcgtgtatttttataacgggattgtccggcatatcatgtagatagttaccgtctacatcgtatactcgaccatctacgcctttaaatcctctatttattgacattaatctattagaattggaataccaaatattagtaccctcaattagtttattggtaatattttttttagacgatagatcgatggctcttgaaaccaaggttttccaaccggactcattgtcgatcggtgagaagtctttttcattagcatgaatccattctaatgatgtatgtttaaacactctaaacaattggacaaattcttttgatttgctttgaatgatttcaaataggtcttcgtctacagtaggcataccattagataatctagccattataaagtgcacgtttacatatctacgttctggaggagtaagaacgtgactattgagacgaatggctcttcctactatctgacgaagagacgcctcgttccatgtcatatctaaaatgaagatatcattaattgagaaaaaactaataccctcgcctccactagaagagaatacgcatgttttaatgcattctccgttagtgtttgattcttggttaaactcagccaccgccttgattctagtatcttttgttctagatgagaactctatattagagataccaaagactttgaaatatagtaataagatttctattcctgactgattaacaaatggttcaaagactagacatttaccatgggatgctaatattcccaaacatacatctataaatttgacgcttttctcttttaattcagtaaatagagagatatcagccgcactagcatcccctttcaatagttctccctttttaaaggtatctaatgcggatttagaaaactctctatctcttaatgaatttttaaaatcattatatagtgttgctatctcttgcgcgtattcgcccggatcacgattttgtctttcaggaaagctatcgaacgtaaacgtagtagccatacgtctcagaattctaaatgatgatatacctgtttttatttcagcgagtttagccttttgataaatttcttcttgctttttcgacatattaacgtatcgcattaatactgttttcttagcgaatgatgcagacccttctacgtcatcaaaaatagaaaactcgttattaactatgtacgaacataggcctcctagtttggagactaattctttctcatcaactagacgtttattctcaaatagcgattggtgttgtaaggatcctggtcgtagtaagttaaccaacatggtgaattcttgcacactattaacgataggtgtagccgataaacaaatcatcttatggttttttaatgcgatggtcttagataaaaaattatatactgaacgagtaggacggatcttaccatcttctttgattaatgatttagaaatgaagttatgacattcatcaataatgacgcatattctactcttggaattaatagttttgatattagtaaaaaatttatttctaaaattttgatcatcgtaattaataaaaatacaatccttcgttatctctggagcgtatctgagtatagtgttcatccaaggatcttctatcaaagcctttttcaccaataagataatagcccaattcgtataaatatccttaagatgtttgagaatatatacagtagtcattgttttaccaacacccgtttcatggaacaataaaagagaatgcatactgtctaatcctaagaaaactcttgctacaaaatgttgataatccttgaggcgtactacgtctgttcccatcatttcaacaggcatattagtagttctgcgcaatgcataatcgatataggccgcgtgtgatttactcatttatgagtgataagtaataactatgttttaaaaatcacagcagtagtttaactagtcttctctgatgtttgttttcgatactttttgaatcagaagtcatactagaataaagcaacgagtgaacgtaatagagagcttcgtatactctattcgaaaactctaagaacttattaatgaattccgtatccactggattgtttaaaatactaaattgaacactgttcacatccttccaagaagaagacttagtgacggacttaacatgagacataaataaatccaaattttttttacaaacatcactagccaccataatggcgctatctttcaaccagctatcgcttacgcattttagcagtctaacatttttaaagagactacaatatattctcatagtatcgattacacctctaccgaataaagttggaagtttaataatacaatatttttcgtttacaaaatcaaataatggtcgaaacacgtcgaaggttaacatcttataatcgctaatgtatagattgttttcagtgagatgattattagatttaatagcatctcgttcacgtttgaacagtttattgtgtgcgctgaggtcggcaactacggcgtccgctttagtactcctcccataatactttacgctattaatctttaaaatttcatagactttatctagatcgctttctggtaacatgatatcatgtgtaaaaagttttaacatgtcggtcggcattctatttagatcattaactctagaaatctgaagaaagtaattagctccgtattccagactaggtaatgggcttttacctaaagacaagttaagttctggcaatgtttcataaaatggaagaaggacatgcgttccctcccggatattttttacaatttcatccatttacaactctatagtttgttttcattattattagttattatctcccataatcttggtaatacttaccccttgatcgtaagataccttatacaggtcattacatacaactaccaattgtttttgtacataatagattggatggttgacatccatggtggaataaactactcgaacagatagtttatctttccccctagatacattggccgtaatagttgtcggcctaaagaatatctttggtgtaaagttaaaagttagggttcttgttccattattgctttttgtcagtagttcattataaattctcgagatgggtccgttctctgaatatagaacatcatttccaaatctaacttctagtctagaaataatatcggtcttattcttaaaatctattcccttgatgaagggatcgttaatgaacaaatccttggcctttgattcggctgatctattatctccgttatagacgttacgttgactagtccaaagacttacaggaatagatgtatcgatgatgttgatactatgtgatatgtgagcaaagattgttctcttagtggcatcactatatgttccagtaatggcggaaaactttttagaaatgttatatataaaagaattttttcgtgttccaaacattagcagattagtatgaagataaacactcatattatcaggaacattatcaatttttacatacacatcagcatcttgaatagaaacgataccatcttctggaacctcaacaatctcggcagactccggataaccagtcggtgggccatcactaacaataactagatcatccaacaatctactcacatatgcatctatataatctttttcatcttgtgagtaccctggatacgaaataaatttattatccgtatttccataataaggtttagtataaacagagagcgatgttgccgcatgaacttcagttacagtcgccgttggttggtttatttgacctattactctcctaggtttctctataaacgatggtttaatttgtacattcttaaccatatatccaataaagctcaattcaggaacataaacaaattctttgttgaacgtttcaaagtcgaacgaagagtcacgaataacgatatcggatactggattgaaggttaccgttacggtaatttttgaatcggatagtttaagactgctgaatgtatcttccacatcaaacggagttttaatataaacgtatactgtagatggttctttaatagtgtcattaggagttaggccaatagaaatatcattaagttcactagaatatccagagtgtttcaaagcaattgtattattgatacaattattatataattcttcgccctcaatttcccaaataacaccgttacacgaagagatagatacgtgattaatacatttatatccaacatatggtacgtaaccgaatcttcccatacctttaacttctggaagttccaaactcagaaccaaatgattaagcgcagtaatatactgatccctaatttcgaagctagcgatagcctgattgtctggaccatcgtttgtcataactccggatagagaaatatattgcggcatatacaaagttggaatttgactatcgactgcgaagacattagaccgtttaatagagtcatccccaccgatcaaagaattaatgatagtattattcattttctatttaaaatggaaaaagcttacaataaactccgtagagaaatatctataatttgtgagttttccttaaagtaacagcttccgtaaacgccgtctttatctcttagtaggtttattgtatttatgaccttttccttatcttcatagaatactaaaggcaacaaagaaatttttggttcttctctaagagctacgtgagacttaaccatagaagccaacgaatccctacatattttagaacagaaatacccaacttcaccacccttgaatgtctcaatactaataggtctaaaaaccaaatcttgattacaaaaccaacacttatcaattacactatttgtcttaatagacacatctgccatagatttataatactttggtagtatacaagcgagtgcttcttctttagcgggcttaaagactgctttaggtgctgaaataaccacatctggaaggcttactcgcttagccatttaattacggaactatttttttatacttctaatgagcaagtagaaaacctctcatctacaaaaacatactcgtgtccataatcctctaccatagttacacgttttttagatctcatatgtgctaaaaagttttcccatactaattggttactattatttttcgtataatttttaacagtttgaggttttagatttttagttacagaagtgatatcgaatattttatccaaaaagaatgaataattaattgtcttagaaggagtgttttcttggcaaaagaataccaagtgcttaaatatttctactacttcattaatcttttctgtactcagattcagtttctcatcttttacttgattgattatttcaaagactaacttataatcctttttatttattctctcgttagccttaagaaaactagatacaaaatttgcatctacatcatccgtggatatttgatttttttccatgatatccaagagttccgagataatttctccagaacattgatgagacaataatctccgcaatacatttctcaaatgaataagtttattagacacatggaagtttgactttttttgtacctttgtacatttttgaaatacagactcgcaaaaaatacaatattcatatccttgttcagatactataccgttgtgtctacaaccgctacataatcgtagattcatgttaacactctacgtatctcgtcgtccaatattttatataaaaacattttatttctagacgttgccagaaaatcctgtaatatttttagttttttgggctgtgaataaagtatcgccctaatatggttaccgtcctccgccaatatagtagttaaattatccgcacatgcagaagaacaccgcttaggcggattcagtacaatgttatatttttcgtaccaactcatttaaatatcataatctaaaatagttctgtaatatgtctagcgctaatatattgatcataatcctgtgcataaattaagatacaacaatgtctcgaaatcatcgacatggcttcttccatagttagaagatcgtcgtcaaagttagcaacgtgattcatcaacatttgctgttttgaggcagcaaatactgaaccgtcgccattcaaccattcataaaaaccatcgtctgaatccattgataatttcttgtactggtttttgagagctcgcatcaatctagcatttctagctcccggattgaaaacagaaagaggatcgtacatccagggtccattttctgtaaatagaatcgtataatgtcccttcaagaagatatcagacgatccacaatcaaagaattggtctccgagtttgtaacaaactgcggactttaacctatacatgataccgtttagcatgatttctggtgatacgtcaatcggagtatcatctattagagatctaaagccggtgtaacattctccaccaaacatattcttattctgacgtcgttctacataaaacatcattgctccattaacgataacaggggaatgaacagcactacccatcacattagttcccaatggatcaatgtgtgtaactccagaacatcttccatatcctatgttaggaggagcgaacaccactcttccactattgccatcgaatgccatagaataaatatccttggaattgatagaaatcggactgtcggatgttgtgatcatcttcataggattaacaactatgtatggtgccgcctgaagtttcatatcgtaactgatgccgtttataggtctagccacagaaaccaacgtaggtctaaatccaactatagacaaaatagaagccaatatctgttcttcatctgtcataacttgagagcatccagtatgaataatcttcattagatggggatctaccgcatcatcatcgttacaataaaaaattcccattctaatgttcataattgcttttctaatcatggtatgcatgtttgctctctgaatctctgtggaaattagatctgatacacctgtaatcactatcggattatcctccgtaagacgattaaccaacaacatataattataagactttacttttctaaattcataaagttgctggattaggctataggtgtctccatgtacatacgcgttctcgagcgcaggaagtttaataccgaatagtgccatcagaataggatgaatatagtaattagtttctggttttctataaataaaagacaaatcttgtgaactagacatatcggtaaaatgcatggattggaatcgtgtagtcgacagaagaatatgatgattagatggagagtatattttatctaactctttgagttggtcaccgattctaggactagctcgagaatgaataagtactaaaggatgagtacatttcacagaaacactagcattgttcaatgtgctctttacatgggtaaggagttgaaatagctcgtttctatttgttctgacaatatttagtttattcataatgttaagcatatcctgaatagtaaagttagatgtgtcatacttgttagtagttagatatttagcaattgcattcccatcatttctcaatctcgtactccaatcatgcgtggatgctacttcgtcgatggaaaccatacaatcctttttgataggctgttgagattgattatttcctgcacgtttaggtttggtacgttgatttctagcccctgcggatataaagtcatcgtctacaattttggataatgaattgcatacactacaagacaaagatttatcagaagtgtgaatatgatcttcatctaccaaagaaagagtttgattagtataactagattttagtcctgcgttagatgttaaaaaaacatcgctattgaccacggcttccattatttatattcgtagtttttactcgaaagcgtgattttaatattcaatcttattacttttggaatcgttcaaaacctttgactaattgtagaatttgatctattgccctacgcgtatactcccttgcatcatatacgttcgtcaccagatcgtttgtttcggcctgaagttggtgcatatctctttcaacattcgacatgagatccttaagggccatatcgtctagattttgttgagatgctgctcctggatttggattttgttgtgctgttgtacatactgtaccaccagtaggtgtaggagtacatacagtggccacaataggaggttgaggaggtgtaaccgttggagtagtacaagaaatacttccatccgattgttgtgtacatgtagttgttggtaacgtctgagaaggttgggtagatggcggtgtcgtcgtcttttgatctttattaaatttagagataatatcctgaacagcattgctcggcgtcaacgctggaaggagtgaactcgccggcgcatcagtatctgcagacagccaatcaaaaagattagacatatcagatgatgtattagtttgttgtcgtggttttggtgtaggagccggtgtagctgttggaaccggctgtggagttatatgaatagttggttgtagcggttggataggctgtctgctggcggccatcatattatctctagctagttgttctcgcaactgtctttgataatacgactcttgagactttagtcctatttcaatcgcttcatcctttttcgtatccggatccttttcttcagaataatagattgacgactttggtgtagaggattctgccagcccctgtgagaacttgttaaagaagtccatttaaggctttaaaattgaattgcgattataagattaaatggcagacacagacgatattatcgactatgaatccgatgatctcaccgaatacgaggatgatgaagaagaggaagaagatggagagtcactagaaactagtgatatagatcccaaatcttcttataagattgtagaatcagcatccactcatatagaagatgcgcattccaatcttaaacatatagggaatcatatatctgctcttaaacgacgctatactagacgtataagtctatttgaaatagcgggtataatagcagaaagctataacttgcttcaacgaggaagattacctctagtttcagaattttctgacgaaacgatgaagcaaaatatgctacatgtaattatacaagagatagaggagggttcttgtcctatagtcatcgaaaagaacggagaattgttgtcggtaaacgattttgacaaagatggtctaaaattccatctagactatattatcaaaatttggaaacttcaaaaacgatattagaatttatacgaatatcgttctctaaatgtcacaatcaagtctcgcatgttcagcaatttattgtcgtactttatatcgtgttcattaacgatatcttgcaaaatagtaatgattctatcttccttcgatagatattcttcagagattattgtcttatattctttcttgttatcagatatgaatttgataagactttgaacattattgatacccgtctgtttaattttttctacagatattttagttttggcagattctatcgtatctgtcaatagacatccaacatcgacattcgacgtcaattgtctataaatcaacgtataaattttagaaataacattagcgaattgttgtgcattgatgtcgttattctgaaacagtatgattttaggtagcattttcttaacaaagagaacgtatttattgttactcagttgaacagatgatatatccagattactaacgcatctgattccatataccaaactttcagaagaaatggtgtacaattgtttgtattcattcaatgtctctttttcagaaattagtttagagtcgaatactgcaataattttcaagagatagttttcatcagataagattttatttagtgtagatatgataaaactattgttttgttggagaacttgatacgccgcgttctctgtagtcgacgctctcaaatgggaaacaatctccattatttttttggaatcggatacaatatcttcggtatcttgacgcaatctagtatacatagagttaagagaaattagagtttgtacattaagcaacatgtctctaaatgtggctgcaaacttttccttttccacatcatctagtttattatataccgatttcacaacggcaccagatttaaggaaccagaatgaaaaactctgataactacaatatttcatcatagttacgattttatcatcttctatagttggtgtaatagcgcatacctttttctccaagactggaaccaacgtcataaaaatgtttaaatcaaaatccatatcaacatctgatgcgctaagaccagtctcgcgttcaagattatctttactaatggtgacgaactcatcgtatagaactctaagtttgtccattatttatttacagatttagttgtttaatttatttgtgctcttccagagttgggatagtatttttctaacgtcggtattatattattaggatctacgttcatatgtatcataatattaatcatccacgttttgataaatctatctttagcttctgaaataacgtatttaaacaaaggagaaaaatatttagctacggcatcagacgcaataacattttttgtaaatgtaacgtatttagacgacagatcttcgttaaaaagttttccatctatgtagaatccatcggttgttaacaccattcccgcgtcagattgaataggagtttgaatagtttgttttggaaatagatccttcaataacttatagttgggtgggaaaaaatcgattttatcactagactctttcttttttactatcattacctcatgaactatttcttgaatgagtatatgtattttctttcctatatcggacgcgttcattggaaaatataccatgtcgttaactataagaatatttttatcctcgtttacaaactgaataatatcagatgtagttcgtaaacgaactatatcatcaccagcacaacatctaactatatgatatccactagtttcctttagtcgtttattatcttgttccatattagcagtcattccatcatttaagaaggcgtcaaagataatagggagaaatgacattttggattctgttacaactttaccaaaattaaggatatacggacttactatctttttctcaacgtcgatttgatgaacacacgatgaaaatgtacttcgatgagattgatcatgtagaaaacaacaagggatacaatatttccacatatcatgaaatatattaagaaatcccaccttattatatttccccaaaggatccatgcatgtaaacattatgccgttatcattaataaagacttctttctcatcggatctgtaaaagttgttactgatttttttcattccaggatctagataattaataatgatgggttttctattcttattctttgtattttggcatatcctagaccagtaaacagtttccactttggtaaaatcagcagacttttgaacgctattaaacatggcattaatggcaataactaaaaatgtaaaatatttttctatgttaggaatatggtttttcactttaatagatatatggtttttggccaaaatgatagatatttttttatccgaggatagtaaaatattattagtcgccgtctctataaaaatgaagctagtctcgatatccaattttattctagaattgataggagtcgccaaatgtaccttatacgttatatctcccttgatgcgttccatttgtgtatctatatcggacacaagatctgtaaatagttttacgttattaatcatcacggtatcgccgtcgctagataacgctaatgtaccatccaagtcccaaatggagagatttaactgttcatcgtttagaataaaatgattaccggtcatattaataaagtgttcatcgtatctagataacaacgacttataattaatgtccaagtcttgaactcgctgaatgatcttttttaacccagttagttttagattggtacgaaatatattgttaaactttgattctacagtaatgtccaaatctagttgtggaaatacttccatcaacattgtttcaaacttgataatattattatctacatcttcatacgatccaaattccggaatagatgtatcgcacgctctggccacccagataaccaaaaagtcacacgctccaggatatacattgtataaaaagctatcgttttttagtagtgtttttttctgagtatatacgaagggattaaaaatagtattatcaacgtaactatattccaaattattcttatgagaatagataataatatcgtccttaatatctaacaaatttcctaaatatccctttaattgagtcattcgaagcgtcaatagaatatgtctcttaactatttccggctgttgtatatttaaatgacttcgtaaaaaataatatatgggcgacttctcatctatgtaatcatatggagtgagatatagggctcgttctacctcctgccccttacccacctgtaataccaattgcggacttactatatatcgcatatttatatcgtggggtaaagtgaaaatctactaccgatgatgtaagtcttacaatgttcgaaccagtaccagatcttaatttggaggcctccgtagaactaggggaggtaaatatagatcaaacaacacctatgataaaggaaaatagcggttttatatcccgtagtagacgtctattcgcccatagatctaaggatgatgagagaaaactagcactacgattctttttacaaagactttattttttagatcatagagagattcattatttgttcagatgcgttgacgctgtaaaagacgtcactattaccaaaaaaaataacattatcgtggcgccttatatagcacttttaactatcgcatcaaaaggatgcaaacttacagaaacaatgattgaagcattctttccagaactatataatgaacatagtaagaaatttaaattcaactctcaagtatccatcatccaagaaaaactcggataccagtttggaaactatcacgtttatgattttgaaccgtattactctacagtagctctggctattcgagatgaacattcatctggcatttttaatatccgtcaagagagttatctggtaagttcattatctgaaataacatatagattttatctaattaatctaaaatctgatcttgttcaatggagtgctagtacgggcgctgtaattaatcaaatggtaaatactgtattgattacagtgtatgaaaagttacaactggtcatagaaaatgattcacaatttacatgttcattggctgtggaatcaaaacttccaataaaattacttaaagatagaaatgaattatttacaaaattcatcaacgagttaaaaaagaccagttcattcaagataagcaaacgcgataaggatacgctactaaaatattttacttaggactggagttagaatttatagacgactcatttcgtttatcattattagtattcttcttgttatcttgttcagaaatatacagcaatgctatgcctaatactaaatacattatcatgcttgcaatggctctaacaacgacgaaccaaaatgaatttggtcgtagcttttgttcacaaaaatacataaagaaatgtctacataaatctatggcgccattggctacttgaaatagcgccagtcctcctacagattttaatatagctgtataacatgacatttattcatcatcaaaagagacagagtcaccatctgtcatatttagattttttttcatgtgttcaaagtatcctctactcatttcattataatagtttatcatacttagaattttaggacggatcaatgagtaagacttgactagatcgtcagtagtaatttgtgcatcgtctattctgcatccgcttcgtcgaataatgtatagcatcgctttgagattctccatagctatcaagtctttatacaatgacatggaaatatctgtgaatactttatacttctccaacatcgatgccttaacatcatcgcctactttagcattgaaaatacgttctattgtgtagatggatgtagcaagatttttaaacaacaatgccatcttacacgatgattgcctcaagtctccaatcgtttgtttagaacgattagctacagagtccaatgcttggctgactagcatattattatctttagaaattgtattcttcaatgaggcgtttatcatatctgtgatttcgttagtcatattacagtctgactgggttgtaatgttatccaacatatcacctatggatacggtacacgtaccagcatttgtaataatcctatctaagatgttgtatggcattgcgcagaaaatatcttctcctgtaatatttccactctcgataaatctactcagattattcttaaatgccttattctctggagaaaagatatcagtgtccatcatttcattaatagtatacgcagaaaagataccacgagtatcaattctatccaagatacttatcggttccgagtcacagataatggtttcctctccttcgggagatcctgcatagaaatatctaggacaatagtttctatactgtctgtaactctgataatctctaaagtcactaactgataccatgaaattgagaagatcaaacgctgaagtaattaatttttctgcctcgtttttactacaactagttttcatcaatgtagtgacgatgtattgtttagttacttttggtctaatactgatgatagagatattattacttcccataatggatcttctagtagtcaccttaaagcccattgatgcaaatagcagatagataaagtcttggtatgactcctttctaatatagtacggactacctttgtcacccaactttatacccacataagccataacaacctctttaatagccgtttcatgaggtttatcagccatgagcctgagtagttggaagaatctcatgaatcctgtctcagaaagtcctatatgcatgatagatttatctttcctgggaaactctcgtatagtcatagatgaaatactcttcaaagtttctgaaataagattagtaacagtcttacctccgactactctaggtaacaaacaaactctaataggtgttttctctgcggagataatatcagaaaggatagagcaataagtagtattattgtgattataaagaccgaatacataacaggtagaatttataaacatcatgtcctgaaggtttttagacttgtattcctcgtaatccataccgtcccaaaacatggatttggtaactttgatagccgtagatctttgttccttcgccaacaggttaaagaaattaataaagaatttgtggtttctacctatgtctacaaattgcacgtttggaagcgccacggttacattcactgcagcattttgaggatcgcgagtatgaagtacgatgttattgtttactggtatatctggaaagaattctaccagtctaggaataagagattgatatcgcatagaaatacaaaagttcataatctcatcatctaagagcattttgttaccattgtaataaatatccactctgtcatatgtataaatgaagtactgttcaaacatgatgagatgtttatatgttggcatagtagtgagatctacgtttggtaatggcaatgtattaagattaactccataatgtctagcagcatctgcgatgttataagcgttgtcaaagcggggtcgatcttgtgctgttatatattgtctaacacctataagattatcaaaatcttgtctgcttaatacaccgttaacaatttttgccttgaattcttttattggtgcattaataacatccttatagaggatgttaaacaaataagtgttatcaaagttaagatctggatatttcttttctgctagaacatccattgagtcggagccatctggtttaatataaccaccgataaatctagctctgtattctgtatccgtcaatctaatattaagaaggtgttgagtgaaaggtggaagatcgtaaaagctgtgagtattaatgataggattagtttccgaactaatgttaattggggtattaataatatctatatttccagcgttaagtgtaacattaaacagttttaattcacgtgacgtggtatcaattaaataattaatgcccaatttggatatagcagcctgaagctcatcttgtttagttacggatcctaatgagttattaagcaatatatcgaacggatgaacgaaggttgttttaagttggtcacatactttgtaatctagacatagatgcggaagaacggtagaaactatacgaaataaatattcagagtcctctaattgatcaagagtaactattgacttaataggcatcatttatttagtattaaatgacgaccgtaccagtgacggatatacaaaacgatttaattacagagttttcagaagataattatccatctaacaaaaattatgaaataactcttcgtcaaatgtctattctaactcacgttaacaacgtggtagatagagaacataatgccgccgtagtgtcatctccagaggaaatatcctcacaacttaatgaagatctatttccagatgatgattctccggccactattatcgaacgagtacaacctcatactactattattgacgatactccacctcctacgtttcgtagagagttattgatatcggaacaacgtcaacaacgagaaaaaagatttaatattacagtatcgaaaaatgctgaagcaataatggaatctagatctatgatatcttctatgccaacacaaacaccatccttgggagtagtttatgataaagataaaagaattcagatgttggaggatgaagtggttaatcttagaaatcaacgatctaatacaaaatcatctgataatttagataattttaccagaatactatttggtaagactccgtataaatcaacagaagttaataagcgtatagccatcgttaattatgcaaatttgaacgggtctcccttatcagtcgaggacttggatgtttgttcagaggatgaaatagatagaatctataaaacgattaaacaatatcacgaaagtagaaaacgaaaaattatcgtcactaacgtgattattattgtcataaatattatcgagcaagcattgctaaaactcggatttgaagaaatcaaaggactgagtaccgatatcacttcagaaattatcgatgtggagatcggagatgactgcgatgctgtagcatcaaaactaggaatcggtaacagtccggttcttaatattgtattgtttatactcaagatattcgttaaacgaattaaaattatttaatttaatacattcccatatccagacaacaatcgtctggattaatctgttcctgtcgtctcataccggacgacatattaatctttttattagtaggcatctttttagatggtttctttttcccagcattaactgagtcgatacctagaagatcgtgattgatctctccgaccattccacgaacttctaattggccgtctctgacggtaccataaactattttaccagcattagtaacagcttggacaatctgaccatccattgcgttgaatgatgtagttgctgttgttctacgtttaggagcaccagaagtatttttggagcccttggatgttgatgtagaagaagacgaggattttgattttggtttacatgtaatacattttgaactctttgattttgtatcacatgcgccggcagtcacatctgtttgagaattaagattattgttgcctcctttgacggctgcatctccaccgatttgcgctagtagatttttaagctgtggtgtaatcttattaactgtttcgatataatcatcgtaactgcttctaacggctaaattttttttatccgccatttagaagctaaaaatatttttatttatgcagaagatttaactagattatacaatgaactaatatgatccttttccagattatttacaaacttggtatttcttggttctggaggaggcgaatttaaattcggacttggattcggattttgtgagttcttgatcttattatacagcgcatataggatggcgacggtaactgctacgcaaataccgatcaacaaaagaataccaatcatttattgacaataacttcactattgatcaagtatgcaatatatcatcttttcactaaataagtagtaataatgattcaacaatgtcgagatatatggacgataataacttagttcacggaaatatcgctatgattggtgtgaatgactccgctaactctgtggggcgcgcagtgctttccccacatagaataaattagcattccgactgtgataataataccaagtataaacgccataatactcaatactttccatgtacgagtgggactggtagacttactaaagtcaataaaggcgaagatacacgaaagaatcaaaagaatgattccagcgattagcacgccggaaaaataatttccaatcataagcatcatgtccatttaactaataaaaattttaaatcgccgaatgaacaaagtggaatataaaccatataaaaacaatagtttgtactgcaaaaataatatctatttttgttttcgaagatatggtaaaattaaatagtagtacacagcatgttataactaacagcagcaacggctcgtaattacttatcatttactagacgaaaaggtggtgggatattttcttgctcaaataatacgaatatatcacccatccattttatgcgatgtttatatactctaatctttaatagatctatagacgacgggtttaccaacaatatagattttatcgattcatctaatttaaacccttccttaaacgtgaatgatctattatctggcataacgatgactctacctgatgaatcggacaatgtactgggccatgtagaataaattatcaacgaattatcgtctacgaacatttatatcatttgttttaattttaggacgcgaataaatggatataaaatagaaaataacagatattacaaccagtgttatggccgcgcccaaccaggtaggcagttttattttatcttttactacaggttctcctggatgatgtacgttaccaactgcagacgtagttctagtacaattagacgtaagttccgcttgggaattttttaacgctaaagagttaacgttaatcgtgcacccaacgtatttacatctagttctttgaacatcttgattataatataaccattttctatctctagattcgtcggtgcactcatgtaaccaacataccctaggtcctaaatatttatctccggaattagattttggataattcgcgcaccaacaatttctatttcctttatgatcgttacaaaagacgtataatgccgtatccccaaaagtaaaataatcaggacgaataattctaataaactcagaacaatatctcgcatccatatgtttggagcaaatatcggaataagtagacatagccggtttccgttttgcacgtaaccattctaaacaattggggtttccaggatcgtttctacaaaatccagtcatgaaatcgtcacaatgttctgtcttgtaattattattaaatatttttggacagtgtttggtatttgtcttagaacaacattttgctacgctatcactatcgcccaggagataatccttttttataaaatgacatcgttgcccggatgctatataatcagtagcgtgttttaaatccttaatatattcaggagttacctcgttctgataatagattaatgatccaggacgaaatttgaaagaactacatggttctccatgaattaatacatattgtttagcaaattcaggaactataaaactactacaatgatctatcgacataccatctatcaaacaaaacttgggtttaatttctcccggagatgtttcataatagtacgtataactttcttctgcaaacttaacagctctattatattcaggataattaaaacctaattccatatatttgtctcgtatatctgctattcctggtgctattttgattctattaagagtaacggctgcccccatttttaataatcgtcagtatttaaactgttaaatgttggtatatcaacatttaccttatttcccgcagtataaggtttgttgcaggtatactgttcaggaatggttacatttatactttttctatagtcctgtctttcgatgttcatcacatatgcaaagaacagaataaacaaaataatgtaagaaataatattaaatatctgtgaattcgtaaatacattgattgccataataattacagcagctacaatacatacaatagacattcccacagtgttgccattacctccacgatacatttgagttactaagcaataggtaataactaagctagtaagaggcaatagaaaagatgagataaatatcatcaatatagagattagaggagggctatatagagccaagacgaacaaaatcaaaccgagtaacgttctaacatcattatttttgaagattcccaaataatcattcattcctccataatcgttttgcatcatacctccatctttaggcataaacgattgctgctgttcctctgtaaataaatctttatcaagcactccagcacccgcagagaagtcgtcaagcatattgtaatatcttaaataactcatttatatattaaaaaatgtcactattaaagatggagtataatctttatgccgaactaaaaaaaatgacttgtggtcaacccctaagtctttttaacgaagacggggatttcgtagaagttgaaccgggatcatcctttaagtttctgatacctaagggattttacgcctctccttccgtaaagacgagtctagtatttgaaacattaacaacgaccgataataaaattactagtatcaatccaacaaatgcgccaaagttatatcctcttcaacgcaaagtcgtatctgaagtagtttctaatatgaggaaaatgatcgaatcaaaacgtcctctatacatcactcttcacttggcgtgtggatttggtaagactattaccacgtgttatcttatggctacacacggtagaaaaaccgtcatttgcgtacccaataaaatgttaatacatcaatggaagacacaggtagaggcagtcggattggaacataagatatccatagatggagtaagtagtctattaaaggaactaaagactcaaagtccggatgtattaatagtagtcagtagacatctgacaaacgatgccttttgtaaatatatcaataagcattatgatttgttcatcttggatgaatcacatacgtataatctgatgaacaatacagcagttacaagatttttagcgtattatcctccgatgatgtgttattttttaactgctacacctagaccatctaacagaatttattgtaacagtattattaatattgccaagttatccgatctaaaaaaaactatctatgcagtagatagtttttttgagccatattccacagataatattagacatatgataaaacgattagatggaccatctaataaatatcatatatataccgagaagttattatctgtagacgagcctagaaatcaacttattcttaataccctggtagaagaattcaagtcaggaactattaatcgcattttagttattactaaactacgtgaacatatggtattcttctacaaacgattattagattttttcggatcagaggttgtatttataggagacgcccaaaatagacgtactccagatatggtcaaatcaatcaaggaactaaatagatttatattcgtatccaccttattttattccggtactggtttagatattcctagtttggattctttgttcatttgctcggcagtaatcaacaatatgcaaatagagcaattactagggagggtatgtcgagaaacagaactattagataggacggtatatgtatttcctagcacatccatcaaagaaataaagtacatgataggaaatttcgttcaacgaattattagtctgtctgtagataaactaggatttaaacaaaaaagttatcggaaacatcaagaatccgatcccacttctgtatgtacaacatcctccagagaagaacgtgtattaaatagaatatttaactcgcaaaatcgttaagaagtttaagcgacgatccgcatgctgcgcaggccagtgtattacccctcatagtattaatataatccaatgatacttttgtgatgtcggaaatcttaaccaatttagactgacaggcagaacacgtcatgcaatcatcatcgtcatcgataactgtagtcttgggcttctttttgcggctcttcattccggaacgcacattggtgctatccatttaggtagtaaaaaataagtcagaatatgccctatagcacgatcgtgcaaaacctggtatatcgtctctatctttatcacaatatagtgtatcgacatctttattattattgacctcgtttatcttggaacatggaatgggaacatttttgttatcaacggccacctttgccttaattccagatgttgtaaaattataactaaacagtctatcatcgacacaaatgaaattcttgtttagacgtttgtagtttacgtatgcggctcgttcgcgtctcattttttcagatattgcaggtactataatattaaaaataagaatgaaataacataggattaaaaataaagttatcatgacttctagcgctgatttaactaacttaaaagaattacttagtctgtacaaaagtttgaaattttcagattctgcggctatagaaaagtataattctttggtagaatggggaacatctacttactggaaaataggcgtgcaaaaggtagctaatgtcgagacgtcaatatctgattattatgatgaggtaaaaaataaaccgtttaatattgatccgggctattacattttcttaccggtatattttgggagcgtctttatttattcgaagggtaaaaatatggtagaacttggatctggaaactcttttcaaataccagatgatatgcgaagtgcgtgtaacaaagtattagacagcgataacggaatagactttctgagatttgttttgttaaacaatagatggataatggaagatgctatatcaaaatatcagtctccagttaatatatttaaactagctagtgagtacggattaaacatacccaaatatttagaaattgaaatagaggaagacacattatttgacgacgagttatactctattatagaacgctctttcgatgataaatttccaaaaatatccatatcgtatattaagttgggagaacttaggcggcaagttgtagactttttcaaattctcattcatgtatattgagtccatcaaggtagatcgtataggagataatatttttattcctagcgttataacaaaatcaggaaaaaagatattagtaaaagatgtagaccatttaatacgatccaaggttagagaacatacatttgtaaaagtaaaaaagaaaaacacattttccattttatacgactatgatggaaacggaacagaaactagaggagaagtaataaaacgaattatagacactataggacgagactattatgttaacggaaagtatttctctaaggttggtagtgcaggcttaaagcaattgactaataaattagatattaatgagtgcgcaactgtcgatgagttagttgatgagattaataaatccggaactgtaaaacgaaaaataaaaaaccaatcagcatttgatttaagcagagaatgtttgggatatccagaagcggattttataacgttagttaataacatgcggttcaaaatagaaaattgtaaggttgtaaatttcaatattgaaaatactaattgtttaaataacccgagtattgagactatatatggaaactttaaccagttcgtctcaatctttaatatcgtcaccgatgtcaaaaaaagattattcgagtgaaataatatgcgcctttgatataggtgcaaaaaatcctgccagaactgttttagaagtcaaggataactccgttagggtattggatatatcaaaattagactggagttctgattgggaaaggcacatagctaaagatttgtcacaatatgaatacactacagttcttctagaacgtcagcctagaaggtcgccgtacgtcaaatttatctattttattaaaggctttttatatcatacatcggctgccaaagttatttgcgtctcgcctgtcatgtctggtaattcatatagagatcgaaaaaagagatcggtcgaagcatttcttgattggatggacacattcggattgcgagactccgttccggatagacgcaaattagacgatgtagcggatagtttcaatttggctatgagatacgtattagataaatggaatactaattatacaccttataataggtgtaaatctagaaattacataaaaaaaatgtaataacgttagtaacgccattatggataatctatttacctttctacatgaaatagaagatagatatgccagaactatttttaactttcatctaataagttgcgatgaaataggagatatatatggtcttatgaaagaacgcatttcctcagaggatatgtttgataatatagtgtataataaagatatacatcatgccattaagaaactagtgtattgcgacatccaacttactaaacacattattaatcagaatacgtatccggtatttaacgattcttcacaagtgaaatgttgtcattatttcgatataaactcagataatagcaatattagctctcgtacagtagagatatttgagagggaaaagtcatctcttgtatcatatattaaaactaccaataagaagagaaaggtcaattatggggaaataaagaaaactgtacatggaggcactaatgcaaattacttttccggtaaaaagtctgatgagtatctgagcactacagtcaggtccaacattaatcaaccttggatcaaaaccatttctaagagaatgagagtagatatcattaatcactctatagtaacgcgtggaaaaagctctatattacaaactatagaaattatttttactaatagaacatgtgtgaaaatattcaaggattctactatgcacattattctatccaaggacaaggatgaaaaggggtgtatacacatgattgacaaattattctatgtctattataatttatttctgttgttcgaggatatcatccaaaacgagtactttaaagaagtagctaatgttgtaaaccacgtactcacggctacggcattagatgagaaattattcctaattaagaaaatggctgaacacgatgtttatggagttagcaatttcaaaatagggatgtttaacctgacatttattaagtcgttggatcataccgttttcccctctctgttagatgaggatagcaaaataaagttttttaaggggaaaaagctcaatattgtagcattacgatctctggaggattgtataaattacgtgactaaatccgagaatatgatagaaatgatgaaggaaagatcgactattttaaatagcatagatatagaaacggaatcggtagatcgtctaaaagaattgcttctaaaatgaaaaaaaaacactaattcagaaatggatcaacgactcggatataagtttttggtgcctgatcctaaagccggagttttttatagaccgttacatttccaatatgtatcgtattctaattttatattgcatcgattgcatgaaatcttgaccgtcaagcggccactcttatcgtttaagaataatacagaacgaattatgatagaaattagcaatgttaaagtgactcctccagattactcacctataatcgcgagtattaaaggtaagagttatgacgcattagccacgttcactgtaaatatctttaaagaggtaatgaccaaagagggtatatccatcactaaaataagtagttatgagggaaaagattctcatttgataaaaattccgctactaataggatacgggaataaaaatccacttgatacagccaagtatcttgttcctaatgtcataggtggagtctttatcaataaacaatctgtcgaaaaagtaggaattaatctagtagaaaagattacaacatggccaaaatttagggttgttaagccaaactcattcactttctcgttttcctccgtatcccctcctaatgtattaccgacaagatatcgccattacaagatatctctggatatatcacaattggaagcgttgaatatatcatcgacaaagacatttataacggtcaatattgttttgctgtctcaatatttatctagagtgagtctagaattcattagacgtagtttatcatacgatatgcctccagaagttgtctatctagtaaacgcgataatagatagtgctaaacgaattactgaatctattactgactttaatattgatacatacattaatgacctggtggaagctgaacacattaaacaaaaatctcagttaacgatcaacgagttcaaatatgaaatgctgcataactttttacctcatatgaactatacacccgatcaactaaagggattttatatgatatctttactaagaaagtttctctactgtatctaccacacttctagatatccagatagagattcgatggtttgtcatcgcatcctaacgtacggcaaatattttgagacgttggcacatgatgaattagagaattacataggcaacatccgaaacgatatcatgaacaatcacaagaacagaggcacttacgcggtaaacattcatgtactaacaactcctggacttaatcatgcattttctagtctattgagtggaaagttcaaaaagtcagacggtagttatcgaacacatcctcactattcatggatgcagaatatttctattcctaggagtgttggattttatccggatcaagtaaagatttcaaagatgttttctgtcagaaaataccatccaagtcaatatctttacttttgttcatcggacgttccggaaagaggtcctcaggtaggtttagtatctcaattgtctgtcttgagttccattacaaatatactaacgtctgagtatttggatttggaaaagaaaatttgtgagtatatcagatcatattataaagatgatataagttactttgaaacaggatttccaatcactatagaaaatgctctagtcgcatctcttaatccaaatatgatatgtgattttgtaactgactttagacgtagaaaacggatgggattcttcggtaacttggaggtaggtattactttagttagggatcacatgaatgaaattcgcattaatattggagcgggaagattagtcagaccattcttggttgtggataacggagagctcatgatggatgtgtgtccggagttagaaagcagattagacgacatgacattctctgacattcagaaagagtttccgcatgtcatcgaaatggtagatatagaacaatttacttttagtaacgtatgtgaatcggttcaaaaatttagaatgatgtcaaaggatgaaagaaagcaatacgatttatgtgactttcctgccgaatttagagatggatatgtagcatcttcactagtgggaatcaatcacaattctggacccagagctattcttggatgtgctcaagctaaacaagctatctcttgtctgagctcggatatacgaaataaaatagacaatggaattcatttgatgtatccagagaggccaatcgtgattagtaaggctttagaaacttcaaagattgcggctaattgcttcggccaacatgttactatagcattaatgtcgtacaaaggtatcaatcaagaggatggaattatcatcaaaaaacaatttattcagagaggcggtctcgatattgttacagccaagaaacatcaagtagaaattccgttggaaaactttaataacaaagaaagagataggtctaacgcctattcaaaattagaaagtaatggattagttagactgaatgctttcttggaatccggagacgctatagcacgaaatatctcatcaagaactcttgaagatgattttgctagagataatcagattagctttgatgtttccgaaaaatataccgatatgtacaaatctcgcgttgaacgagtacaagtagaacttactgacaaagttaaggtacgagtattaaccatgaaagaaagaagacccattctaggagacaaatttaccactagaacgagtcaaaagggaacagtcgcgtatatcgcggatgaaacggaacttccatacgatgaaaatggtatcacaccagatgtcattattaattctacatccatcttctctagaaaaactatatctatgttgatagaggttattttaacagccgcatattctgctaagccgtacaacaataagggagaaaaccgacctgtctgttttcctagtagtaacgaaacatccatcgatacatatatgcaattcgctaaacaatgttatgagcattcaaatccgaaattgtctgatgaagaattatcggataaaatcttttgtgaaaagattctctatgatcctgaaacggataagccttatgcatccaaagtattttttggaccaatttattacttgcgtctgaggcatttaactcaggacaaggcaaccgttagatgtagaggtaaaaagacgaagctcattagacaggcgaatgagggacgaaaacgtggaggaggtatcaagttcggagaaatggagagagactgtttaatagcgcatggtgcagccaatactattacagaagttttgaaagattcggaagaagattatcaagatgtgtatgtttgtgaaaattgtggagacatagcagcacaaatcaagggtattaatacatgtcttagatgttcaaaacttaatctctctcctctcttaacaaaaattgataccacacacgtatctaaagtatttcttactcaaatgaacgccagaggcgtaaaagttaaattagatttcgaacgaaggcctccttcgttttataaaccattagataaagttgatctcaaaccgtcttttctggtctaatattgtttagtagatacttatcaacatcatcaagattatcaagattatcaagattatcaagataagctaattcactaaacacattatcgatttcggtatcgttactcgcagaataaagttcgttatgatcctgatattcggaaatctgtggagtttcaggttttggtggatgtgtaacagctacttgagataccgaagtctgatattcagaaagctgtggatgttctggttcggcatccaccgatggtgttacaccactactaattggttcagtaacgtctgtggacgatggaggcaccacttctacaggttctggttctttatcctcagtcatcaacggagctacttcaatgcgaggaaatgtataatttggtaatggtttctcgtgtggatctgaagaagaggtaagatatctactagaaagataccgatcacgttctagttctcttttgtagaacttaactttttctttctcagcatctagttgatattccaacctcttcacgttactacgttcagatttcaattcacgttcgcatgggttacctccgcagtttttacgagcgatttcacgttcagccttcatgcgtctctccctctctctatcgagtttatcagagcagtctttctgaaggcgatcgaactccataaatttctccaacgctttgattgtttccatagatttccgaagttcagcttttaggactgtgattctttttctttcgaattcacagctggatgtacaaccgtttccattaccgccatctctaagtttcttttctagatcggcaacatttcatccccatgccttttacattcctcgagtctactgtcgtcgaaatatcgttccagctccttttcgacatcaataactttagcacgttgtctctcaagctctcttttgtagttatctgattccctggcacgtttaagatcttcatgcaattgagtcagctcttaacacaatctcttgcttcttcgtcatagtacgcgcaatcactgtgagatccattgttaccacgtctacactcggcgagctcgcgtttaagagattcaatttcccgtttgtattggtccatgtttccattgctaccaccattagatttacaggctgctagttgtcgttcgagatcagaaatacgggttttcttggaattgatttcgtcgatgtacttggcatcgaaacacttattaagttctttttccaattctacgattttatttctttcgcgagtcaattccctcctgtagtaactatctgttttgtcagattcacgctctctacgtagactttcttgcaagttactaatttgttccctagcacgtccgagtttagttttatatgctgaatagagttctgattcatcctttgagcagatctctagagatcgttcaagatccctgattctagtctttagcctatttacctcctcggaagatgctccgttaccgttgcgtttacactcgttaagctgtctatcaagatccatgattctatctctaagacgttgcatctctctttccatatcagcattgctttcattattacgtctgcagtcactcaactgtctttcaatatctgagattctatctctaagacgtcgcatctctctctgtttcggcattggtttcattattacgtctacagtcgttcaactgtctttcaagatctgatattctagattggagtctgctaatctctgtagcattttcacggcattcactcagttgtctttcaagatctgagattttagattggagtctgctaatctctgtaagatttcctcctccgctctcgatgcagtcggtcaacttattctctagttctctaatacgcgaacgcagtgcatcaacttcttgcgtgtcttcctggttgcgtgtacattcatcgagtctagattcgagatctctaacgcgtcgtcgttcttcctcaagttctctgcgtactacagaaagcgtgtccctatcttgttgatatttagcaatttctgattctagagtactgattttgcttacgtagttactaatatttgtcttggccttatcaagatcctccttgtatttgtcgcattccttgatatccctacgaagtctggacagttcccattcgacattacgacgtttatcgatttcagctcggagatcgtcatcgcgttgttttagccacatacgactgagttcaagttctcgttgacaagatccatctacttttccattcctaatagtatccagttccttttctagttctgaacgcatttctcgttccctatcaagcgattctctcaattctcggatagtcttcttatcaatttctaataaatctgaaccatcatctgtcccattttgaatatccctgtgttctttgatctcttttgtaagtcggtcgattctttcggttttataaacagaatccctttccaaagtcctaatcttactgagtttatcactaagttctgcattcaattcggtgagttttctcttggcttcttccaactctgttttaaactctccactatttccgcattcttcctcgcatttatctaaccattcaattagtttattaataactagttggtaatcagcgattcctatagccgttcttgtaattatgggaacataattaggatcttctaatggattgtatggcttgatagcatcatctttatcattattagggggatggacaaccttaattggttggtcctcatctcctccagtagcgtgtggttcttcaataccagtgttagtaataggcttaggcaaatgcttgtcgtacgcgggcacttcctcatccatcaagtatttataatcgggttctacttcagaatattcttttctaagagacgcgacttcgggagttagtagaagaactctgtttctgtatctatcaacgctggaatcaatactcaagttaaggatagcgaatacctcatcgtcatcatccgtatcttctgaaacaccatcatatgacatttcatgaagtctaacgtattgataaacagaatcagatttagtattaaacagatccttaacctttttagtaaacgcatatgtatattttagatctccagatttcataatatgatcacatgccttaaatgtcagtgcttccatgatataatctggaacactaatgggtgacgaaaaagatacagcaccatatgctacgttgataaataaatctgaaccactaagtagataatgattaatgttaaggaagaggaaatattcagtatatagatatgccttagcatcatatcttgtactaaacacgctaaacagtttattgatgtgatcaatttccaacagaataattagagcagcgggaataccaacaaacatattaccacatccgtattttctatgaatatcacatattatgttaaaaaatcttgatagaagagcgaatatctcgtctgacttaatgagacgtagttcagcagcagcataagtcataactgtaaatagaacatactttcctgtagtgttgattctagactccacatcaacaccattattaaaaatagttttatatacatctttaatctgctctccgttaatcgtcgaacgttctagtatacggaaacactttgatttcttatctgtagttaatgacttagtgatatcacgaagaatattacgaattacatttcttgtttttcttgagagacctgattcagaactcaactcatcgttccatagtttttttacctcagtggcgaaatctttggagtgcttggtacatttttcaataaggttcgtgacctccatttattataaaaaattttattcaaaacttaactacaatcgggtaattataaaatcgtagatctcccatgtggtggaatactaccatctatcgcatgtggatggacagtaggtaatggccatgggaacagtaatgtttgcatatttatctttcttgccagtattactgcatattgtcccaatgtttcgatgtgatgttctaacctatcaactgccgctgtatcacaacaatagtgtccgatgaaattaagattatgatccaatgtgtttaatatatgattatcaagtcttatacgatccgcgtcttttttgacaggatcaggttcttctacaggaagaagtttcggcctcttatgatattcatgtctgggaaacggtggtctagggtgaggctccggtatcggagtgggttttggattataatcatcatcgtctatgacatcatcttcgacttcgatatttattttgctatcttgatgatgtcctgtatcagttgcattttcagcactcgactgaatattagcgcattcattgtttattattaccatatttctaaacccaaaatgtatatgttgaacatcactactatcgttgatgagtcttatagcatgaattcgcttatcgttatcgggtttagcttctgtcaccttagcaattccttttttattaaactctacataatcatatccatttctattgtttgttctaatataaacgagtatagcatcattgctaaatttttcaatagtatcgaaaacagaatatcctaaaccatataatatatattcaggaacactcaaactaaatgtccaggattctcctaaatacgtaaactttaatagtgcgaaatcattcaaaaatctaccacttatagatagatagtacataaatgcgtatagtagtctacctatctctttattatgaaaaccggcattacgatcatatatgtcgtgatatacctgtgatccgtttacgttaaaccataaatacatgggtgatcctataaacatgaatttatttctaattctcagagctatagttaattgaccgtgtaatatttgcttacatgcatacttgatacgctcattaataagatttttatcattgctcgttatctcagaatcgtatatataaggagtaccatcgtgattcttaccagatattatacaaaatactatatataaaatatattgaccaacgttagtaatcatataaatgtttaacgttttaaattttgtattcaatgatccattatcatacgctagcatggtcttatgatattcattctttaaaatataatattgtgttagccattgcattggggctcctaatggagattttttattctcatccattttaggataggctttcataaagtccctaataacttcgtgaataatgtttctatgttttctactgatgcatgtatttgcttcgattttttttatcccatgtttcatctatcatagatttaaacgcagtaatgctcgcaacattaacatcttgaaccgttggtacaattccgttccataaatttataatgttcgccatttatataactcattttttgaatatacttttaattaacaaaagagttaagttactcatatggacgccgtccagtctgaacatcaatctttttagccagagatatcatagccgctcttagagtttcagcgtgattttccaacctaaatagaacttcatcgttgcgtttacaacacttttctatttgttcaaactttgttgttacattagtaatctttttttccaaattagttagccgttgtttgagagtttcctcattgtcgtctccatcggctttaacaattgcttcgcgtttagcctctggctttttagcagcctttgtagaaaaaaattcagttgctggaattgcaagatcgtcatctccggggaaaagagttccgtccatttaaagtacagattttagaaactgacactctgcgttatttatatttggtacaacacatggattataaatatcgatgttaataacatcagaaaatgtaaagtctatacattgttgcatcgtgttaaattttctaatggatctagtattattgggtccaacttctgcctgaaatccaaatatggaagcggatacaaaaccgtttcctggataaaccacacatctccacttttgctttacatcagaaattgtgtcattgacatcttgaactctcctatctaatgccggtgttccacctatagattttgaatattcgaatgctgcatgagtagcattaaattccttaatattgccataattttcatatattgagtaaccctggataaaaagtaaacacaccgcagccgtcgctaccacaataaaaaaaattgatagagagttcatttataatctattagaagctgacaaaatttttttacacgcatcagacaatgctttaataaatagttcaacatctacttttgtcatatcgaaccgatggtatgattctaacctagaattacatccgaaaaagttgactatgttcatagtcattaagtcattaacaaacaacattccagactctggattataagacgatactgtttcgtcacaatcacctaccttaatcatgtgattatgaatattggctattagagcaccttctaagaaatctataatatctttgaaacacgatttaaaatcaaaccacgaatatacttctacgaagaaagttagtttacccataggagagataactataaatggagatctagatacaaaatccggatctatgatagttttaacattattatattctctattaaatacctccacatctaaaaatgttaattttgaaactatgtcttcgtttattaccgtacctgaactaaacgctataagctctattgtttgagaactctttaaacgatattcttgaaatacatgtaacaaagtttcctttaactcggtcggtttatctaccatagttacagaatttgtatccttatctataatataataatcaaaatcgtataaagttatataattatcgcgttcagattgtgatcttttcaaatagactaaaaaccccatttctctagtaagtatcttatgtatatgtttgtaaaatatcttcatggtgggaatatgctctaccgcagttagccattcctcattgacagcggtagatgtattagacaaaactattccaatgtttaacaagggccattttacgagattattaaatccttgtttgataaatgtagccaatgagggttcgagttcaacgacgattgaattctcttcccgcggatgctgcatgatgaacgacgggatgttgttcgattgatttggaattctttttcgactttttgtttatattaaatattttaaaatttatagcggatagcaattcatgtaccacggataatgtagacgcgtattgcgcatcgatatctttattattagataaatttatcaataaatgtgagaagtttgcctcgttaaggtcttccatttaaatattatataaacatttgtgtttgtatcttattcgtcttttatggaatagttttttactagtaaagctgcaattacacactttgtccgtaaaacataaatataaacaccagcttttatcaatcgttccaaaaagtcgacggcggacatttttaacatggcatctattttaaatacacttaggtttttggaaaaaacatcattttataattgtaacgattcaataactaaagaaaagattaagattaaacataagggaatgtcatttgtattttataagccaaagcattctaccgttgttaaatacttgtctggaggaggtatatatcatgatgatttggttgtattggggaaggtaacaattaatgatctaaagatgatgctattttacatggatttatcatatcatggagtgacaagtagtggaacaatttacaaattgggatcgtctatcgatagactttctctaaataggactattgttacaaaagttaataattataattatgatacattttttgacgatgatgattgatcgctattgcacaattttgtttttttactttctaatatagcgtttagattctttttcatgtgcgaatattgatttactaaaatatctatgtttaacttttgttctataacgtccttatcggcggtatcggtacatatacgtaattcaccttcacaaaatacggagtcttcgataataatagccaatcgattattggatctagctgtctgtatcatattcaacatgtttaatatatcctttcgtttcccctttacaggcatcgatcgtagcatattttccgcgtctgagatggaaatgttaaaactacaaaaatgcgtaatgttagcccgtcctaatattggtacgtgtctataagtttggcatagtagaataatagacgtgtttaaatgccttccaaagtttaagaattctattagagtattgcattttgatagtttatcgcctacatcatcaaaaataagtaaaaagtgtgctgattttttatgattttgtgcgacagcaatacatttttctatgttacttttagttcgtatcagattatattctagagattcctgactactaacgaaattaatatgatttggccaaatgtatccatcataatctggattataaacgggtgtaaacaagaatacatgtttatattttttaactagtgtagaaaacagagatagtaaatagatagtttttccagatccagatcctcccgttaaaaccattctaaacggcatttttaataaattttctcttgaaaattgtttttcttggaaacaattcataattatatttacagttactaaattaatttgataataaatcaaaatatggaaaactaaggtcgttagtagggaggagaacaaagaaggcacatcgtgacataaataacatttattatcatgatgacaccagaaaacgacgaagagcagacatctgtgttctccgctactgtttacagagacaaaattcagggaaagaataaacgcaaacgcgtgattggtctatgtattagaatatctatggttatttcactactatctatgattaccatgtccgcgtttctcatagtgcgcctaaatcaatgcatgtctgctaacgaggctgctattactgacgccgctgttgccgttgctgctgcatcatctactcatagaaaggttgcgtctagcactacgcaatatgatcacaaagaaagctgtaatggtttatattaccagggttcttgttatatattacattcagactaccagttattctcggatgctaaagcaaattgcactgcggaatcatcaacactacccaataaatccgatgtcttgactacctggctcattgattatgttaaggatacatggggatctgatggtaatccaattacaaaaactacatccgattatcaagattctgatgtatcacaagaagttagaaagtatttttgtgttaaaacaatgaactaatatttatttttgtacattaataaatgaaatcgcttaatagacaaactgtaagtaggtttaagaagttgtcggtgccggtcgctataatgatgatactctcaaccattattagtggcataggaacatttctgcattacaaagaagaactgatgcctagtgcttgcgccaatggatggatacaatacgataaacattgttatttagatactaacattaaaatgtctacagataatgcggtttatcagtgtcgtaaattacgagccagattgcctagaccggatactagacatctgagagtattgtttagtattttttataaagattattgggtaagtttaaaaaagaccaataataaatggttagatattaataatgataaagatatagatattagtaaattaacaaattttaaacaactaaacagtacgacggatgctgaagcgtgttatatatacaagtctggaaaactggttgaaacagtatgtaaaagtactcaatctgtactatgtgttaaaaaattctacaagtgacaacaaaaaatgaattaataataagtcgttaacgtacgccgccatggacgccgcgtttgttattactccaatgggtgtgttgactataacagatacattgtatgatgatctcgatatctcaatcatggactttataggaccatacattataggtaacataaaaactgtccaaatagatgtacgggatataaaatattccgacatgcaaaaatgctactttagctataagggtaaaatagttcctcaggattctaatgatttggctagattcaacatttatagcatttgtgccgcatacagatcaaaaaataccatcatcatcatagcatgcgactatgatatcatgttagatatagaagataaacatcagccattttatctattcccatctattgatgtttttaacgctacaatcatagaagcgtataacctgtatacagctggagattatcatctaatcatcaatccttcagataatctgaaaatgaaattgtcgtttaattcttcattctgcatatcagacggcaatggatggatcataattgatgggaaatgcaatagtaattttttatcataaaagttgtaaagtaaataataaaacaataaatattgaactagtagtacgtatattgagcaatcagaaatgatgctggtacctcttatcacggtgaccgtagttgcgggaacaatattagtatgttatatattatatatttgtaggaaaaagatacgtactgtctataatgacaataaaattatcatgacaaaattaaaaaagataaagagttctaattccagcaaatctagtaaatcaactgatagcgaatcagactgggaggatcactgtagtgctatggaacaaaacaatgacgtagataatatttctaggaatgagatattggacgatgatagcttcgctggtagtttaatatgggataacgaatccaatgttatggcgcctagcacagaacacatttacgatagtgttgctggaagcacgctgctaataaataatgatcgtaatgaacagactatttatcagaacactacagtagtaattaatgaaacggagactgttgaagtacttaatgaagataccaaacagaatcctaactattcatccaatcctttcgtaaattataataaaaccagtatttgtagcaagtcaaatccgttcattacagaactcaacaataaatttagtgagaataatccgtttagacgagcacatagcgatgattatctaaataagcaagaacaagatcatgaacacgatgatatagaatcatcggtcgtatcattggtgtgattagtttcctttttataaaattgaagtaatatttagtattattgctgccgtcacgttgtacaaatggagatattccctgtattcggcatttctaaaattagcaattttattgctaataatgactgtagatattatatagatacagaacatcaaaaaattatatctgatgagatcaatagacagatggatgaaacggtacttcttaccaacatcttaagcgtagaagttgtaaatgacaatgagatgtaccatcttattcctcatagattatcgacgattatactctgtattagttctgtcggaggatgtgttatctctatagataatgacgtcaatggcaaaaatattctaacctttcccattgatcatgctgtaatcatatccccactgagtaaatgtgtcgtagttagcaagggtcctacaaccatactggttgctaaagcggatatacccagcaaacgattggtaacatcgtttacaaacgacatactgtatgtaaacaatctatcactgattaattatttgccgttgtctgtattcattattagacgagtcaccgactatttggatagacacatatgcgatcagatatttgctaataataagtggtattcccttataaccatcgacgataagcaatatcctattccatcaaattgtataggtatgtcttctgccaagtacataaattctagcatcgagcaagatactttaatacatgtttgtaacctcgagcatccattcgacttagtatacaaaaaaatgcagtcgtacaattctgtacctatcaaggaacaaatattgtacggtagaattgataatataaatatgagcattagtatttctgtggattaatagatttctagtatggggatcattaatcatctctaatctctaaatacctcataaaacgaaaaaaaagctattatcaaatactgtacggaatagattcattctcttctctttttatgaaactctgttgtatatctactgataaaactggaagcaaaaaatctgatagaaagaataagaataagatcaagatcaaggattatatggaacacgattattataaaataacaatagttcctggttcctcttccacgtctactagctcgtggtattatacacatgcctagtaatagtctctttgcgttgatggaaagcagactagaaataacaggctaaaatgttcagacaccataatagttcccaacccagataataacagagtaccatcaacacattcctttaaactcaatcccaaacccaaaaccgttaaaatgtatccggccaattgatagtagataatgaggtgtacagcgcatgataatttacacagtaaccaaaatgaaaatactttagtaattataagaaatatagatggtaacgtcatcatcaacaatccaataatatgccggagagtaaacattgacggataaaacaaaaatgctccgcataactctatcatggcaataacacaaccaaatacttgtaagattcctaaattagtagaaaatacaacggatatcgatgtataagtgatctcgagaaataataagaataaagtaatgcccgtaaagataaacatcaacattgtttggtaatcattaaaccaattagtatgacgttgaactaatttcacagtaaattttattccagtgttatcctcgcatgtataagtacctggtaagatatctttatattccataatcaatgagacatcactatctgataacgaatgaagtctagcactagtatgccatttacttaatattgtcgtcttggaagttttattataagttaaaatatcatggttatccaatttccatctaatatactttgtcggattatctatagtacacggaataatgatggtatcattacatgctgtatactctatggtctttgtagttgttataacaaccaacgtatagaggtatatcaacgatattctaactcttgacattttttatttatttaaaatgatacctttgttatttattttattctattttgctaacggtattgaatggcataagtttgaaacgagtgaagaaataatttctacttacttattagacgacgtattatacacgggtgttaatggggcggtatacacattttcaaataataaactaaacaaaactggtttagctaatactaattatatcacaacatctataaaagtagagaatgaggatacattagtatgcggaaccaataacggaaatcccaaatgttggaaaatagacggttcagacgacccaaaacatagaggtagaggatacgctccttatcaaaatagcaaagtaacgataatcagttacaacgaatgtgtactatctgacataaacatatcaaaagaaggaattaaacgatggagaagatttgacggaccatgtggttatgatttattcacggcggataacgtaattccaaaagatggtttacgaggagcattcgtcgataaagacggtacttatgacaaagtttacattcttttcactgatactatcggctcaaagagaattgttaaaattccgtatatagcacaaatgtgcctaaacgacgaaggtggtccatcatcattgtctagtcatagatggtcgacgtttctcaaagtcgaattagaatgtgatatcgacggaagaagttatagacaaattattcattctagaactataaaaacagataatgatacgatactatatgtattcttcgatagtccttattccaagtccgcattatgtacctattctatgaataccattaaacaatctttttctacgtcaaaattggaaggatatacaaagcaattgccgtctccagctcctggtatatgtctaccagctggaaaagttgttccacataccacgtttgaagtcatagaaaaatataatgtactagatgatattataaagcctttatctaaccaacctatcttcgaaggaccgtctggtgttaaatggttcgatataaaggagaaggaaaatgaacatcgggaatatagaatatacttcataaaagaaaattctatatattcgttcgatacaaaatctaaacaaactcgtagctcgcaagtcgatgcgcgactattttcagtaatggtaacttcgaaaccgttatttatagcagatatagggataggagtaggaatgccacaaatgaaaaaaatacttaaaatgtaatcttaatcgagtacaccacacgacaatgaacaaacataagacagattatgctggttatgcttgctgcgtaatatgcggtctaattgttggaattatttttacagcgacactattaaaagttgtagaacgtaaattagttcatacaccatcaatagataaaacgataaaagatgcatatattagagaagattgtcctactgactggataagctataataataaatgtatccatttatctactgatcgaaaaacctgggaggaaggacgtaatgcatgcaaagctctaaatccaaattcggatctaattaagatagagactccaaacgagttaagttttttaagaagcattagacgcggatattgggtaggagaatccgaaatattaaaccagacaaccccatataattttatagctaagaatgccacgaagaatggaactaaaaaacggaaatatatttgtagcacaacgaatactcccaaactgcattcgtgttacactatataacaattacactacatttttatcataccactacttcggttagatgttttagaaaaaaataaatatcgccgtaccgttcttgtttttataaaaataacaattaacaattatcaaattttttctttaatattttacgtggttgaccattcttggtggtaaaataatctcttagtgttggaatggaatgctgtttaatgtttccacactcatcgtatattttgacgtatgtagtcacatcgtttacgcaatagtcagactgtagttctatcatgcttcctacattagaaggaggaacagttttaaagtctcttggttttaatctattaccgttagttttcatgaaatcctttgttttatccacttcacattttaaataaatgtccactatacattcttttgttaattttactagatcgtcatgggtcatagaatttataggttccgtagtccatggatccaaactagcaaacttcgcgtatacggtatcgcgattagtgtatacaccaactgtatgaaaattaagaaaacagtttaataaatcaacagaaatatttaatcctccgtttgatacagatgcgccatatttatggatttcggattcacacgttgtttgtctgaggtgttcgtctagtgttgcttctacgtaaacttcgattcccatatattctttattgtcagaatcgcataccgatttatcatcatacactgtttgaaaactaaatggtatacacatcaaaataataaataataacgagtacattctgcaatattgttatcgtaattggaaaattagtgttcgagtgagtcggattatgtgagtactggattgtatattttattttatattttgtaataagaataaaatgctaatgtcaagtttattccaatagatgtcttattaaaaaacatatataataaataacaatggctgaatggcataaaattatcgaggatatctcaaaaaataataagttcgaggatgccgccatcgttgattacaagactacaaagaatgttctagctgctattcctaacagaacatttgccaagattaatccgggtgaaattattcctctcatcactaatcgtaatattctaaaacctcttattggtcagaaatattgtattgtatatactaactctctaatggatgagaacacgtatgctatggagttgcttactgggtacgcccctgtatctccgatcgttatagcgagaactcataccgcacttatatttttgatgggtaagccaacaacatccagacgtgacgtgtatagaacgtgtagagatcacgctacccgtgtacgcgcaactggtaattaaaataaaaagtaatattcatatgtagtatcaattttaaatgatgatgatgaaatggataatatccatattgacgatgtcaataatgccggtattggcatacagttcatcgatttttagatttcattcagaggatgtggaattatgttatgggcatttgtattttgataggatctataatgtagtaaatataaaatataatccgcatattccatatagatataattttattaatcgcacgttaaccgtagatgaactagacgataatgtcttttttacacatggttattttttaaaacacaaatatggttcacttaatcctagtttgattgtctcattatcaggaaacttaaaatataatgatatacaatgctcagtaaatgtatcgtgtctcattaaaaatttggcaacgagtacatctactatattaacatctaaacataagacttattctctacatcggtccacgtgtattactataataggatacgattctattatatggtataaagatataaatgacaagtataatgacatctatgattttactgcaatatgtatgctaatagcgtctacattgatagtgaccatatacgtgtttaaaaaaataaaaatgaactcttaattatgctatgctattagaaatggataaaatcaaaattacggttgattcaaaaattggtaatgttgttaccatatcgtataacttggaaaagataactattgatgttacacctaaaaagaaaaaagaaaaggatgtattattagcgcaatcagttgctgtcgaagaggcaaaagatgtcaaggtagaagaaaaaaatattatcgatattgaagatgacgatgatatggatgtagaaagcgcataatactatctataaacataagtatataataaatactttttatttacggtactcttgtagtggtgataccctactcaattatttttttaaaaaaatacttattctgattcttctagccatttccgtgttcgttcgaatgccacatcgacgttaaagataggggagtagttgaaatctagttctgcattgttggtacgcacctcaaatgtagtgttggatatcttcaacgtatagttgttgagtagtgatggttttctaaatagaattctcttcatatcattcttgcacgcgtacatttttagcatccatcttggaatcctagatccttgttctattcccaatggtttcatcaatagaagattaaacatatcgtacgaacacgatggagagtaatcgtagcaaaagtaagcatttcctttaatcttagatcccggatactggatatattttgcagccaacacgtgcatccatgcaacatttcctacatatacccggctatgcaccgcgtcatcatcgactgtacgatacataatgttaccgtgttgcttacattgctcgtaaaagactttcgtcaatttgtctccttctccgtaaattccagtgggtcttaggcaacaagtatacaattttgctccattcatgattacggaattattggctttcataaccagttgctcggccatacgtttactttttgcgtatacatgtcctggtgatatatcataaagggtatgctcatggccgatgaatggatcaccgtgtttatttggtcctattgcttccatgctactagtatagatcaaatacttgattcctaggtccacacaagctgccaatatagtctgtgttccataatagtttactttcatgatttcattatcggtgtattttccaaatacatccactagagcagccgtatgaataatcagatttaccccatctagcgcttctctcaccttatcaaagtcgtttatatcacattgtatatagtttataaccttaactttcgaggttattggttgtggatcttctacaatatctatgactctgatttcttgaacatcatctgcactaattaacagttttactatatacctgcctagaaatccggcaccaccagtaaccgcgtacacggccattgctgccactcataatatcagactacttattctattttactaaataatggctgtttgtataatagaccacgataatatcagaggagttatttactttgaaccagtccatggaaaagataaagttttaggatcagttattggattaaaatccggaacgtatagtttgataattcatcgttacggagatattagtcaaggatgtgattccataggcagtccagaaatatttatcggtaacatctttgtaaacagatatggtgtagcatatgtttatttagatacagatgtaaatatatctacaattattggaaaggcgttatctatttcaaaaaatgatcagagattagcgtgtggagttattggtatttcttacataaatgaaaagataatacattttcttacaattaacgagaatggcgtttgatatatcagttaatgcgtctaaaacaataaatgcattagtttacttttctactcagcaaaataaattagtcatacgtaatgaagttaatgatacacactacactgtcgaatttgatagggacaaagtagttgacacgtttatttcatataatagacataatgacaccatagagataagaggggtgcttccagaggaaactaatattggttgcgcggttaatacgccggttagtatgacttacttgtataataagtatagttttaaactgattttagcagaatatataagacacagaaatactatatccggcaatatttattcggcattgatgacactagatgatttggctattaaacagtatggagacattgatctattatttaatgagaaacttaaagtagactccgattcgggactatttgactttgtcaactttgtaaaggatatgatatgttgtgattctagaatagtagtagctctatctagtctagtatctaaacattgggaattgacaaataaaaagtataggtgtatggcattagccgaacatatatctgatagtattccaatatctgagctatctagactacgatacaatctatgtaagtatctacgcgggcacactgagagcatagaggatgaatttgattattttgaagacgatgattcgtctacatgttctgccgtaaccgacagggaaacggatgtataattttttttatagcgtgaaggatatgataaaaaatataattgttgtatttatcccattccaatcaccttatatgattctgtaaaaaaattatactgtaacacaatgaaggagtcttatagatgtatagaggtcagatactggtttgataaactgtttattccacataagtatgtttgactttatggttagacccgcatactttaacaaatcactgaaaattggagttaggtattgacctctcagaatcagttgccgttctggaacattaaatgtattttttatgatatactccaacgcatttatgtgggcatacaacaagtcattactaatggagtattccaagagttttagttgtctagtatttaacaagagaagagatttcaacagactgtttatgaactcgaatgccgcctcattgtcgcttatattgatgatgtcgaattctcccaatatcatcaccgatgagtagctcatcttgttatcgggatccaagttttctaaagatgtcattaaaccctcgatcatgaatggatttatcatcatcgtttttatgttggacatgagcttagtccgtttgtccacatctatagacgacgatttctgaattatttcatatatccctctctttaactccaggaacttgtcaggatggtctactttaatatgttctcgtctaagagatgaaaatctttggatggttgcacgcgacttttctctaaaggatgacgttgcccaagatcctctcttaaatgaatccatcttatccttggacaagatggacagtctattttccttagatggtttaatatttttgttacccatgatctataaaggtagacctaatcgtctcggatgaccatatatttattttcagttttattatacgcataaattgtaaaaaatatgttaggtttacaaaaatgtctcgtggggcattaatcgtttttgaaggattggacaaatctggaaaaacaacacaatgtatgaacatcatggaatcaataccttcaaacacaataaaataccttaactttcctcagagatccactgtcactggaaagatgatagatgactatctaactcgtaaaaaaacctataatgatcatatagttaatctattattttgtgcaaatagatgggagtttgcatcttttatacaagaacaactagaacagggaattactttaatagttgatagatacgcattttctggagtagcgtatgccgccgctaaaggcgcgtcaatgactctcagtaagagttatgaatctggattgcctaaacccgacttagttatattcttggaatctggtagcaaagaaattaatagaaacgtcggcgaggaaatttatgaagatgttacattccaacaaaaggtattacaagaatataaaaaaatgattgaagaaggagatattcattggcaaattatttcttctgaattcgaggaagatgtaaagaaggagttgattaagaatatagttatagaggctatacacacggttactggaccagtggggcaactgtggatgtaatagtgaaattacattttttataaatagatgttagtacagtgttataaatggatgaagcatattactctggcaacttggaatcagtactcggatacgtgtccgatatgcataccgaactcgcatcaatatctcaattagttattgccaagatagaaactatagataatgatatattaaacaaggacattgtaaattttatcatgtgtagatcaaacttggataatccatttatctctttcctagatactgtatatactattatagatcaagagatctatcagactgagttgattaattcattagacgacaatgaaattatcgattgtatagttaataagtttatgagcttttataaggataacctagaaaatatagtagatgctatcatcactctaaaatatataatgaataatccagattttaaaactacgtatgcagaagtactcggttccagaatagcggatatagatattaaacaagtgatacgtgagaatatactacaattgtctaatgatatccgcgaacgatatttgtgaaaaatattaaaaaaaaatactttttttattaaatgacgtcgcttcgcgaatttagaaaattatgctgtgatatatatcacgcatcaggatataaagaaaaatctaaattaattagagactttataacagatagggatgataaatatttgatcattaagctattgcttcccggattagacgatagaatttataacatgaacgataaacaaattataaaattatatagtataatatttaaacaatctcaggaagatatgctacaagatttaggatacggatatataggagacactattaggactttcttcaaagagaacacagaaatccgtccacgagataaaagcattttaactttagaagaagtggatagttttttaactacgttatcatccgtaactaaagaatcgcatcaaataaaattattgactgatatcgcatccgtttgtacatgtaatgatttaaaatgtgtagtcatgcttattgataaagatctaaaaattaaagcgggtcctcggtacgtacttaacgctattagtcctaatgcctatgatgtgtttagaaaatctaataacttgaaagagataatagaaaattcatctaaacaaaatctagactctatatctatttctgttatgactccaattaatcccatgttagcggaatcgtgtgattctgtcaataaggcgtttaaaaaatttccatcaggaatgtttgcggaagttaaatacgatggtgaaagagtacaagttcataaaaataataacgagtttgccttctttagtagaaacatgaaaccagtactctctcataaagtggattatctcaaagaatacataccgaaagcatttaaaaaagctacgtctatcgtattggattctgaaattgttcttgtagacgaacataatgtaccgctcccgtttggaagtttaggaatacacaaaaagaaagaatataaaaactctaacatgtgtttgttcgtgtttgactgtttgtactttgatggattcgatatgacggacattccattgtacgaacgaagatcttttctcaaagatgttatggttgaaatacccaatagaatagtattctcagagttgacgaatattagtaacgagtctcagttaactgacgtattggatgatgcactaacgagaaaattagaaggattggtcttaaaagatattaatggagtatacgaaccgggaaagagaagatggttaaaaataaagcgagactatttgaacgagggttccatggcagattctgccgatttagtagtactaggtgcttactatggtaaaggagcaaagggtggtatcatggcagtctttctaatgggttgttacgacgatgaatccggtaaatggaagacggtaactaaatgttccggtcacgatgataatacgttaagggagttgcaagaccaattaacgatgattaaaattaacaaggatcccaaaaaaattccagagtggttagtagttaataaaatctatattcccgattttgtagtagaggatccgaaacaatctcagatatgggaaatttcaggagcagagtttacatcttccaagtcacatacagcgaatggaatatcgattagatttcctagatttactaggattagagaagataaaacgtggaaagaatctactcatctaaacgatttagtaaacttgactaaatcttaatagttacatacaaattaaaataacactatttagttggtggtcgccatggatggtgttattgtatactgtctaaacgcgctagtaaaacatggcgaggaaataaatcatataaaaaatgatttcatgattaaaccatgttgtgaaagagtttgtgaaaaagttaagaacgttcacatcgacggacaatctaaaaacaatacagtgattgcagatttgccatatctggataatgctgtatcggatgtatgcaaatcgatatatatatatatatagtatcaagaatatccagatttgctaatttgataaagatagatgacgatgacaagactcctactggtgtatataattattttaaacctaaagatgccattcctgttattatatccataggaaaggatagagatgtttgtgaactattaatctcatctgataaagcgtgtgcgtgtatagagttaaattcatatcacgtagccattcttcccatgaatgtttccttttttaccaaaggaaatgcctcgttgattattctcctgtttgatttctctatcgatgcagcacctctcttaagaagtgtaaccgataataatgttattatatctagacactagcgtctacatgacgagcttccgagttccaattggttcaagttttacataagtataaagtccgactattgttctatattatatatggttgttgatggatctgtgatgcatgcgatagctgataatagaacttacgcaaatattagcaaaaatatattagacaatactacaattaacgatgagtgtagatgctgttattttgaaccacagattaggattcttgatagagatgagatgctcaatggatcatcgtgtgatatgaacagacattgtattatgatgaatttacctgatgtaggcaaatttggatctagtatgttggggaaatatgaacctgacatgattaagattgctctttcggtggctggtaatttaataagaaatcgagactacattcccgggagacgaggatatagctactacgtttacggtatagcctctagataatttttttaagcacgaaataaaaaacataattttaaaccaatctatttcatactattttgtgtgatcaccatggacataaagatagatattagtatttctggtgataaatttacggtgactactaggagggaaaatgaagaaagaaaaaaatatctacctctccaaaaagaaaaaactactgatgttatcaaacctgattatcttgagtacgatgacttgttagatagagatgagatgtctactattctagaggaatattttatgtacagaggtctattaggcctcagaataaaatatggacgactctttaacgaaattaaaaaattcgacaatgatgcggaagaacaattcggtactatagaagaactcaagcagaaacttagattaaattctgaagagggagcagataactttatagattatataaaggtacaaaaacaggatatcgtcaaacttactgtatacgattgcatatctatgataggattgtgtgcatgcgtggtagatgtttggagaaatgagaaactgttttctagatggaaatattgtttacgagctattaaactgtttattaatgatcacatgcttgataagataaaatctatactgcagaatagactagtatatgtggaaatgtcatagaaagttaatgagagcaaaaatatataaggttgtattccatatttgttattttttctgtaatagttaaaaaaatacattcgatggtctatctatcagattattatgtgttataaggtactttttctcataataaactagagtatgagtaagatagtgtttttcaaaacatataaatctaaaattgatggatgagatatacagctattaatttcgaaaatatataaatctaaaattgatggataagatatacagctattaatttcgaaaatatattttaatctgataactttaaacatggatttttgatggtggtttaacgttttaaaaaaagattttgttattgtagtatatgataatattaaaagatggatataaagaatttgctgactgcatgtactattttttacattactacattggctacggcagatatacctactccgccaccacacgctccggtaaacgggtcatgtgacaagggagaatatcttgataagaggcataatcaatgttgtaatcggtgtccacctggagaatttgccaaggttagatgtagtggtagtgataacacaaaatgtgaacgctgcccacctcatacatataccacaatcccaattattctaatggatgtcatcaatgtagaaaatgcccaacaggatcatttgataaggtaaagtgtaccggaacacagaacagtaaatgttcgtgtcttcctggttggtattgcgctactgattcttcacagactgaagattgttgaaattgtgtaccaaaaaggagatgtccatgcggatactttggtggaatagatgaacaaggaaatcctatttgtaaatcgtgctgtattggtgaatattgcaactacctacgtaattatagacttgatccattttctccatgcaaactatctaaatgtaattaattatgattttgatgataatgttaccatacattatatcgctacttggttagtgtattattcagtatgaagacctattaataattacttatcttttgacgatcttgttataattataatataaaaacttatggcatagtaacttataattgctaacacgataaattcgtaataatctgttttgttcaaaggaatctacaggcataaaaataaaaatataatttataatatactcttacagcgcgccatcatgaataacagcagtgaattgattgctgttattaatggatttagaaatagtggacgattttgtgatattagtatagttattaatgatgaaatgataaacgctcacagactcatcctatctggagcctccgaatatttttccattctgttttccaataattttatcgattctaatgaatacgaagttaatctaagtcatttagattatcaaagtgttaacgatttgatcgattacatttatgggatacctttgagcctaactaacgataacgtgaaatatattctttcaaccgctgattttttacaaattggatctgccattactgagtgcgaaaaatacatacttaaaaatctttgttctagaaactgtatcgatttctacatatacgctgataaatataataacaagaaaatagaatcagcgtcgtttaacacaatattacaaaatattttgaaactcatcaacgatgaaaactttaaatacttaacagaggaatcaatgataaaaattttaagcgatgatatgttaaatataaaaaatgaggatttcgccccactaattctcattaaatggttagagagtactcaacaatcatgcaccgtcgagttacttagatgcctcagaatatcattgctttccccacaagttataaaatcactttatagtcatcaactggttagttcaatctacgaatgtataacattcttaaacaatatagcattcttggatgaatcatttcctagataccatagcatcgagttgatatctatcggtataagtaattcgcatgataagatttccataaactgctacaatcataaaaaaaatacatgggaaatgatatcttcacgtagatataggtgtagtttcgcagtggccgtcctggataatattatttatatgatgggtggatatgatcagtccccgtatagaagttcaaaggttatagcgtacaatacatgtacaaattcttggatatatgatataccagagctaaaatatcctcgttctaattgtgggggactggctgatgacgaatacatttattgtataggcggcatacgcgatcaggattcatcgttgacatctagtattgataaatggaagccatcaaaaccatattggtagaagtatgctaaaatgcgcgaaccaaaatgtgatatgggggttgcgatgttaaacggattaatatatgtcatgggtggaatcgttaaaggtgacacgtgtaccgacgcactagagagtttatcagaagatggatggatgaagcatcaacgtcttccaataaaaatgtccaatatgtcgacgattgttcatgatggcaagatttatatatctggaggttacaacaatagtagtgtagttaatgtaatatcgaatctagtccttagctataatccgatatatgatgaatggaccaaattatcatcattaaacattcctagaattaatcccgctctatggtcagcgcataataaattatatgtaggaggaggaatatctgatgatgttcgaactaatacatctgaaacatacgataaagaaaaagattgttggacattggataatggtcacgtgttaccacgcaattatataatgtataaatgcgaaccgattaaacataaatatccattggaaaaaacacagtacacgaatgattttctaaagtatttggaaagttttataggtagttgatagaacaaaatacataattttgtaaaaataaatcactttttatactaatatgacacgattaccaatacttttgttactaatatcattagtatactctacaccttctcctcagacatctaaaaaataggtgatgatgcaactctatcatgtaatcgaaataatacaaatgactacgttgttatgagtgcttggtataaggagcccaattccattattcttttagctgctaaaagcgacgtcttgtattttgataattataccaaggataaaatatcttacgactctccatacgatgatctagttacaactatcacaattaaatcattgactgctagagatgccggtacttatgtatgtgcattctttatgacatcgcctacaaatgacactgataaagtagattatgaagaatactccacagagttgattgtaaatacagatagtgaatcgactatagacataatactatctggatctacacattcaccagaaactagttctgagaaaccagaggatatagataattttaattgctcgtcggtattcgaaatcgcgactccggaaccaattactgataatgtagaagatcatacagacaccgtcacatacactagtgatagcattaatacagtaagtgcaacatctggagaatccacaacagacgagactccggaaccaattactgataaagaagatcatacagttacagacactgtctcatacactacagtaagtacatcatctggaattgtcactactaaatcaaccaccgatgatgcggatctttatgatacgtacaatgatacagtaccatcaactactgtaggtagtagtacaacctctattagtaattataaaaccaaggactttgtagaaatatttggtattaccgcattaattatattgtcggccgtggcaatattctgtattacgtattatatatgtaataaacgttcacgtaaatacaaaacagagaacaaagtctagatttttgacttacataaatgtctgggatagtaaaatctatcatattgagcggaccatctggtttaggaaagacagccatagccaaaagactatgggaatatatttggatttgtggtgtcccataccactagatttcctcgtcctatggaacgagaaggtgtcgattaccattacgttaacagagaggccatctggaagggaatagccgccggaaactttctagaacatactgagtttttaggaaatatttacggaacttctaaaactgctgtgaatacagcggctattaataatcgtatttgtgtgatggatctaaacatcgatggcgttagaagtcttaaaaatacgtacctaatgccttactcggtgtatataagacctacctctcttaaaatggttgagaccaagcttcgtcgtagaaacactgaagcggatgatgagattcatcgtcgtgtgatgttggcaaaaactgacatggatgaggcaggtgaagccggtctattcgacactattatcattgaagatgatgtgaatttagcatatagtaagttaattcagatactacaggaccgtattagaatgtattttaacactaattaaagacttaagacttaaaacttgataattaataatataactcgtttttatatgtggctatttcaacgtctaatgtattagttaaatattaaaacttaccacgtaaaacttaaaatttaaaatgatatttcattgacagatagatcacacattatgaactttcaaggacttgtgttaactgacaattgcaaaaatcaatgggtcgttggaccattaataggaaaaggtggattcggtagtatttatactactaatgacaataattatgtagtaaaaatagagcccaaagctaacggatcattatttaccgaacaggcattttatactagagtacttaaaccatccgttatcgaagaatggaaaaaatctcacaatataaagcacgtaggtcttatcacgtgcaaggcatttggtctatacaaatccattaatgtggaatatagattcttggtaattaatagattaggtgcagatctagatgcggtgatcagagccaataataatagattaccaaaaaggtcggtgatgttgatcggaatcgaaatcttaaataccatacaatttatgcacgagcaaggatattctcacggagatattaaagcgagtaatatagtcttggatcaaatagataagaataaattatatctagtggattacggattggtttctaaattcatgtctaatggcgaacatgttccatttataagaaatccaaataaaatggataacggtactctagaatttacacctatagattcgcataaaggatacgttgtatctagacgtggagatctagaaacacttggatattgtatgattagatggttgggaggtatcttgccatggactaagatatctgaaacaaagaattgtgcattagtaagtgccacaaaacagaaatatgttaacaatactgcgactttgttaatgaccagtttgcaatatgcacctagagaattgctgcaatatattaccatggtaaactctttgacatattttgaggaacccaattacgacgagtttcggcacatattaatgcagggtgtatattattaagtgtggtgtttggttgatgtaaaatttttgttgataaaaattaaaaaaataacttaatttattattgatctcgtgtgtacaaccgaaatcatggcgatgttttacgcacacgctctcggtgggtacgacgagaatcttcatgcctttcctggaatatcatcgactgttgccaatgatgtcaggaaatattctgttgtgtcagtttataataacaagtatgacattgtaaaagacaaatatatgtggtgttacagtcaggtgaacaagagatatattggagcactgctgcctatgtttgagtgcaatgaatatctacaaattggagatccgatccatgatcaagaaggaaatcaaatttctatcatcacataccgccacaaaaactactatgctctaagcggaatcgggtacgagagtctagacttgtgtttggaaggagtagggattcatcatcacacacttgaagcaggaaacgctgtatatggaaaagttcaacatgattattctactatcaaagagaaggccaaagaaatgagtacacttagtccaggacctataattgattaccacgtctggataggagattgtatctgtcaagttactgctgtggacgtacatggaaaggaaattatgagaatgagattcaaaaagggtgcggtgcttccgatcccaaatctggtaaaagttaaacttggggagaatgatacagaaaatctttcttctactatatcggcggcaccatcgaggtaaccacctctctggaagacagcgtgaataatgtactcatgaaacgtttggaaactatacgccatatgtggtctgttgtatatgatcattttgatattgtgaatggtaaagaatgctgttatgtgcatacgcatttgtctaatcaaaatcttataccgagtactgtaaaaacaaatttgtacatgaagactatgggatcatgcattcaaatggattccatggaagctctagagtatcttagcgaactgaaggaatcaggtggatggagtcccagaccagaaatgcaggaatttgaatatccagatggagtggaagacactgaatcaattgagagattggtagaggagttcttcaatagatcagaacttcaggctggtaaattagtcaaatttggtaattctattaattgttaaacatacatctgtttcagctaagcaactaagaacacgtatacggcagcagcttccttttatactctcatcttttaccaacacaaagggtggatatttgttcattggagttgataataatacacacaaagtatttggattcacggtgggttacgactacctcagactgatagagaatgatatagaaaagcatatcaaaagactttgtgttgtgcatttctgtgagaagaaagaggacatcaagtacacgtgtcgattcatcaaggtatataaacctggggatgaggctacctcgacatacgtgtgcgctatcaaagtggaaagatgctgttgtgctgtgtttgcagattggccagaatcatggtatatggatactaatggtatcaataagtattctccagatgaatgggtgtcacatataaaattttaattaatgtaatagagaacaaataataaggttgtaatatcatatagacaataactaacaattaattagtaactgttatctcttttttaactaaccaactaactatatacctattaatacatcgtaattatagttcttaacatctattaatcattaattcgcttctttaattttttataaactaacattgttaattgaaaagggataacatgttacagaatataaattatatatggatttttttaaaaaggaaatacttgactggagtatatatttatctcttcattatatagcacgcgtgtgttccaatttttccacatcccatataatacaggattataatctcgttcgaacatacgagaaagtggataaaacaatagttgattttttatctaggttgccaaatttattccatattttagaatatggggaaaatattctacatatttattctatggatgatgctaatacgaatattataattttttttctagatagagtattaaatattaataagaacgggtcatttatacacaatctcgggttatcatcatccattaatataaaagaatatgtatatcaattagttaataatgatcatccagataataggataagactaatgcttgaaaatggacgtagaacaagacattttttgtcctatatatcagatacagttaatatctatatatgtattttaataaatcatggattttatatagatgccgaagacagttacggttgtacattattacatagatgtatatatcactataagaaatcagaatcagaatcatacaatgaattaattaagatattgttaaataatggatccgatgtagataaaaaagatacgtacggaaacacaccttttatcctattatgtaaacacgatatcaacaacgtggaattgtttgagatatgtttagagaatgctaatatagactctgtagactttaatagatatacacctcttcattatgtctcatgtcgtaataaatatgattttgtaaagttattaatttctaaaggagcaaatgttaatgcgcgtaataaattcggaactactccattttattgtggaattatacacggtatctcgcttataaaactatatttggaatcagacacagagttagaaatagataatgaacatatagttcgtcatttaataatttttgatgctgttgaatctttagattatctattatccagaggagttattgatattaactatcgtactatatacaacgaaacatctatttacgacgctgtcagttataatgcgtataatacgttggtctatctattaaacaaaaatggtgattttgagacgattactactagtggatgtacatgtatttcggaagcagtcgcaaacaacaacaaaataataatggaagtactattgtctaaacgaccatctttgaaaattatgatacagtctatgatagcaattactaaacataaacagcataatgcagatttattgaaaatgtgtataaaatatactgcgtgtatgaccgattatgatactcttatagatgtacagtcgctacagcaatataaatggtatattttaagatgtttcgatgaaatagatatcatgaagagatgttatataaaaaataaaactgtattccaattagttttttgtatcaaagacattaatactttaatgagatacggtaaacatccttctttcgtgaaatgcactagtctcgacgtatacggaagtcgtgtacgtaatatcatagcatctattagatatcgtcagagattaattagtctattatccaagaagctggatcctggagataaatggtcgtgttttcctaacgaaataaaatataaaatattggaaaactttaacgataacgaactgtccacatatctaaaaatcttataaacattattaaaatataaaatctaagtaggataaaatcacactacatcattgtttccttttagtgctcgacagtgtatactatttttaacactcataaataaaaatgaaaacgatttccgttgttacgttgttatgcgtactacctgctgttgtttattcaacatgtactgtacccactatgaataacgctaaattaacgtctaccgaaacatcgtttaatgataaacagaaagttacatttacatgtgatcagggatatcattctttggatccaaatgctgtctgtgaaacagataaatggaaatacgaaaatccatgcaagaaaatgtgcacagtttctgattatgtctctgaattatatgataagccattatacgaagtgaattccaccatgacactaagttgcaacggcgaaacaaaatattttcgttgcgaagaaaaaaatggaaatacttcttggaatgatactgttacgtgtcctaatgcggaatgtcaacctcttcaattagaacacggatcgtgtcaaccagttaaagaaaaatactcatttggggaatatataactatcaactgtgatgttggatatgaggttattggtgctttgtacataagttgtacagctaattcttggaatgttattccatcatgtcaacaaaaatgtgatatgccgtctctatctaacggattaatttccggatctacattttctatcggtggcgttatacatcttagttgtaaaagtggttttatactaacgggatctccatcatccacatgtatcgacggtaaatggaatcccatactcccaacatgtgtacgatctaacgaaaaatttgatccagtggatgatggtcccgacgatgagacagatttgagcaaactctcgaaagacgttgtacaatatgaacaagaaatagaatcgttagaagcaacttatcatataatcatagtggcgttaacaattatgggcgtcatatttttaatctccgttatagtattagtttgttcctgtgacaaaaataatgaccaatataagttccataaattgctaccgtaaatataaatccgttaaaataattaataattaataacgaacaagtatcaaaagattaaagaattatagctagaatcaattgagatgtcttcttcagtggatgttgatatctacgatgccgttagagcatttttactcaggcactattataacaagagatttattgtgtatggaagaagtaacgccatattacataatatatacaggctatttacaagatgcgccgttataccgttcgatgatatagtacgtactatgccaaatgaatcacgtgttaaacaatgggtgatggatacacttaatggtataatgatgaatgaacgcgatattactgtatgtgtgggcaccggaatactattcatggaaatgtttttcgattacaataaaaatagtatcaacaatcaactaatgtatgatataattaatagcgtatctataattctagctaatgagagatatagaagcgcttttaacgacgatggtatatacatccgtagaaatatgattaacaagttgtacggatacgcatctctaactactattggcacgatcgctggaggtgtttgttattatctgttgatgcatctagttagtttgtataaataattatttcaatatactagttaaaattttaagattttaaatgtataaaaaactaataacgtttttatttgtaataggtgcagtagcatcctattcgaataatgagtacactccgtttaataaactgagtgtaaaactctatatagatggagtagataatatagaaaattcatatactgatgataataatgaattggtgttaaattttaaagagtacacaatttctattattacagagtcatgcgacgtcggatttgattccatagatatagatgttataaacgactataaaattattgatatgtataccattgactcgtctactattcaacgcagaggtcacacgtgtagaatatctaccaaattatcatgccattatgataagtacccttatattcacaaatatgatggtgatgagcgacaatattctattactgcagagggaaaatgctataaaggaataaaatatgaaataagtatgatcaacgatgatactctattgagaaaacatactcttaaaattggatctacttatatatttgatcgtcatggacatagtaatacatattattcaaaatatgatttttaaaaatttaaaatatattatcacttcagtgacagtagtcaaataacaaacaacaccatgagatatattataattctcgcagttttgttcattaatagtatacatgctaaaataactagttataagtttgaatccgtcaattttgattccaaaattgaatggactggggatggtctatacaatatatcccttaaaaattatggcatcaagacgtggcaaacaatgtatacaaatgtaccagaaggaacatacgacatatccgcatttccaaagaatgatttcgtatctttctgggttaaatttgaacaaggcgattataaagtggaagagtattgtacgggactatgcgtcgaagtaaaaattggaccaccgactgtaacattaactgaatacgacgaccatatcaatttgtacatcgagcatccgtatgctactagaggtagcaaaaagattcctatttacaaacgcggtgacatgtgtgatatctacttgttgtatacggctaacttcacattcggagattctaaagaaccagtaccatatgatatcgatgactacgattgcacgtctacaggttgcagcatagactttgtcacaacagaaaaagtgtgcgtgacagcacagggagccacagaagggtttctcgaaaaaattactccatggagttcggaagtatgtctgacacctaaaaagagtgtatatacatgcgcaattagatccaaagaagatgttcccaatttcaaggacaaaatggccagagttatcaagagaaaatttaataaacagtctcaatcttatttaactaaatttctcggtagcacatcaaatgatgttaccacttttcttagcatgcttaacttgactaaatattcataactaatttttattaatgatacaaaaacgaaataaaactgcatattatacactggttaacgcccttataggctctaaccattttcaagatgaggtccctgattatagtccttctgttcccctctatcatctactccatgtctattagacgatgtgagaagactgaagaggaaacatggggattgaaaatagggttgtgtataattgccaaagatttttatcccgaaagaactgattgcagtgttcatctcccaactgcaagtgaaggattgataactgaaggcaatggattcagggatatacgaaacaccgataaattataaaaaaagcaatgtgtccgctgtttccgttaataatactattttcgtaactggcggattattcataaataactctaatagcacgatcgtggttaacaatatggaaaaacttgacatttataaagacaaacaatggtcgattatagaaatgcctatggctagggtatatcacggcatcgactcgacatttggaatgttatattttgccggaggtctatccgttaccgaacaatatggtaatttagagaaaaacaacgagatatcttgttacaatcctagaacgaataagtggtttgatatttcatatactatttataagatatccatatcatcattgtgtaaactaaataacgtcttctatgtatttagtaaggacattggatatgtggaaaagtatgatggtgcatggaagttagtacatgatcgtctccccgctataaaggcattatcaacttctccttattgattgaaaatgaaaatataaatagtttttatgtatagcagtattaccctatagttttattgcttactactaacatggatacagatgttacaaatgtagaagatatcataaatgaaatagatagagagaaagaagaaatactaaaaaatgtagaaattgaaaataataaaaacattaacaagaatcatcccaatgaatatattagagaagcactcgttattaataccagtagtaatagtgattccattgataaagaagttatagaatgtatctgtcacgatgtaggaatatagatcatatctactaatttttataatcaatacaaaacataaaaaacaactcgttattacatagcaggcatggaatccttcaagtattgttttgataacgatggcaagaaatggattatcggaaatactttatattctggtaattcaatactatataaggtcagaaaaaatttcactagttcgttctacaattacgtaatgaagatagatcacaaatcacacaagccattgttgtctgaaatacgattctatatatctgtattggatcctttgactatcgacaactggacacgggaacgtggtataaagtatttggctattccagatctgtatggaattggagaaaccgatgattatatgttcttcgttataaagaatttgggaagagtattcgccccaaaggatactgaatcagtcttcgaagcatgcgtcactatgataaacacgttagagtttatacactctcgaggatttacccatggaaaaatagaaccgaggaatatactgattagaaataaacgtctttcactaattgactattctagaactaacaaactatacaagagtggaaactcacatatagattacaacgaggacatgataacttcaggaaatatcaattatatgtgtgtagacaatcatcttggagcaacagtttcaaaacgaggagatttagaaatgttgggatattgcatgatagaatggttcggtggcaaacttccatggaaaaacgaaagtagtataaaagtaataaaacaaaaaaaagaatataaaaaatttatagctactttctttgaggactgttttcctgaaggaaatgaacctctggaattagttagatatatagaattagtatacacgttagattattctcaaactcctaattatgacagactacgtaaactgtttatacaagattgaaattatattctttttttatagagtgtggtagtgttacggatatctaatattaatattagactatctctatcgcgctacacgaccaatatcgattactatggatatcttcagggaaatcgcatcttctatgaaaggagagaatgtattcatttctccagcgtcaatctcgtcagtattgacaatactgtattatggagctaatggatccactgctgaacagctatcaaaatatgtagaaacggaggagaacacggataaggttagcgctcaaaatatctcattcaaatccatgaataaagtatatgggcgatattctgccgtgtttaaagattcctttttgagaaaaattggcgataagtttcaaactgttgacttcactgattgtcgcactatagatgcaatcaacaagtgtgtagatatctttactgaggggaaaatcaatccactattggatgaaccattgtctcctagcaattagtgccgtatactttaaagcaaaatggttgacgccattcgaaaaggaatttaccagtgattatcccttttacgtatctccgacggaaatggtagatgtaagtatgatgtctatgtacggcaaggcatttaatcacgcatctgtaaaggaatcattcggcaacttttcaatcatagaactgccatatgttggagatactagtatgatggtcattcttccagacaagattgatggattagaatccatagaacaaaatctaacagatacaaattttaagaaatggtgtaactctctggaagctacgtttatcgatgttcacattcccaagtttaaggtaacaggctcgtataatctggtggatactctagtaaagtcaggactgacagaggtgttcggttcaactggagattatagcaatatgtgtaattcagatgtgagtgtcgacgctatgatccacaaaacgtatatagatgtcaatgaagagtatacagaagcagctgcagcaacttgtgcactggtgtcagactgtgcatcaacaattacaaatgagttctgtgtagatcatccgttcatctatgtgattaggcatgttgatggaaaaattcttttcgttggtagatattgctctccgacaactaattgttaaccattttttttaaaaaatagaaaaaacatgtggtattagtgcaggtcgttattcttccaattgcaattggtaagatgacggccaactttagtacccacgtcttttcaccacagcactgtggatgtgacagactgaccagtattgatgacgtcagacaatgtttgactgaatatatttattggtcgtcctatgcataccgcaacaggcaatgcgctggacaattgtattccacactcctctcttttagagatgatgcggaattagtgttcatcgacattcgcgagctggtaaaaaatatgccgtgggatgatgtcaaagattgtgcagaaatcatccgttgttatataccggatgagcaaaaaaccatcagagagatttcggccatcatcggactttgtgcatatgctgctacttactggggaggtgaagaccatcccactagtaacagtctgaacgcattgtttgtgatgcttgagatgctaaattacgtggattataacatcatattccggcgtatgaattgatgagttgtacatcttgacattttcttctttcttctcttctccctttcccagaaacaaacttttttacccactataaaataaaatgagtatactacctgttatatttctttctatatttttttattcttcattcgttcagacttttaacgcgtctgaatgtatcgacaaagggcaatattttgcatcattcatggagttagaaaacgagccagtaatcttaccatgtcctcaaataaatacgctatcatccggatataatatattagatattttatgggaaaaacgaggagcggataatgatagaattataccgatagataatggtagcaatatgctaattctgaacccgacacaatcagactctggtatttatatatgcattaccacgaacgaaacctactgtgacatgatgtcgttaaatttgacaatcgtgtctgtctcagaatcaaatatagattttatctcgtatccacaaatagtaaatgagagatctactggcgaaatggtatgtcccaatattaatgcatttattgctagtaacgtaaacgcagatattatatggagcgggcatcgacgccttagaaataagagacttaaacaacggacacctggaattattaccatagaagatgttagaaaaaatgatgctggttattatacatgtgttttagaatatatatacggtggcaaaacatataacgtaaccagaattgtaaaattagaggtacgggatagaataatacatcctactatgcaattaccagatggcattgtaacttcaataggtagtaatttgactattgcatgcagagtatcgttgagacctcccacaacggatgcagacgtcttttggataagtaatggtatgtattacgaagaagatgatggggacggaaacggtagaataagtgtagcaaataaaatctatatgaccgataagagacgtgttattacatcccggttaaacattaatcctgtcaaggaagaagatgctacaacgtttacgtgtatggcgtttactattcctagcatcagtaaaacagttactgttagtataacgtgaatgtatgttgttacatttccatgtcaattgagtttataagaatttttatacattatcttccaacaagcaattgacgaacgtattgctatgattaactcccacgatactatgcatattattaatcattaacttgcagactatacctagagctattttgacatactcgtgttcttgtgtaattgcagtatctatattattaaagtacgtaaatctagctatagttttattatttaattttagataatataccgtctccttatttttaaaaattgccacatcctttattaaatcatgaatgggaatttctatgtcatagttaatatattgtgaacaacaagagcagatatctataggaaagggtggaatgcgatacattgatctatgtagttttaaaacacacgcaaactttgaagaatttatataaatcattccatcgatacatccttctatgttgagatgtatatatccaggaattcgtttattaatatcgggaaatgtataaactaaaacattgcccggaagcggagcttctaccggagttatatcagtttttaacttacaaaatgtaaccaatacctttgcatgacttgttttgttcggcaacgttagtttaaacttgacgaatggattaattacaatagcatgatccgcgcatctattaagtttttttactttaacgcccttgtatgtttttacagagactttatctaaatttctagtgcttgtatgtgttataaatataacgggatatagaactgaatcacctaccttagatacccaattacattttatcagatccagataataaacaaattttgtcgccctaactaattctatattgttatatattttacaattggttatgatatcatgtaataacttggagtctaacgcgcatcgtcgtacgtttatacaattgtgatttagtgtagtatatctacacatgtatttttccgcactatagtattctggactagtgataaaactatcgttatatctgtcttcaatgaactcatcgagatattgctctctgtcatattcatacacctgcataaactttctagacatcttacaatccgtgttattttaggatcatatttacatatttacgggtatatcaaagatgttagattagttaatgggaatcgtctataataatgaatattaaacaattatatgaggacttttaccacaaagcatcataaaaatgagtcgtcgtctgatttatgttttaaatatcaaccgcgaatcaactcataaaatacaagagaatgaaatatatacatattttagtcattgcaatatagaccatacttctacagaacttgattttgtagttaaaaactatgatctaaacagacgacaacctgtaactgggtatactgcactacactgctatttgtataataattactttacaaacgatgtactgaagatattattaaatcatggagtggatgtaacgatgaaaaccagtagcggacgtatgcctgtttatatattgcttactagatgttgcaatatttcacatgatgtagtgatagatatgatagacaaagataaaaaccacttattacatagagactattccaacctattactagagtatataaaatctcgttacatgttattaaaggaagaggatatcgatgagaacatagtatccactttattagataagggaatcgatcctaactttaaacaagacggatatacagcgttacattattattatttgtgtctcgcacacgtttataaaccaggtgagtgtagaaaaccgataacgataaaaaaggccaagcgaattatttctttgtttatacaacatggagctaatctaaacgcgttagataattgtggtaatacaccattccatttgtatcttagtattgaaatgtgtaataatattcatatgactaaaatgctgttgacttttaatccgaatttcgaaatatgtaataatcatggattaacgcctatactatgttatataacttccgactacatacaacacgatattcttgttatgttaatacatcactatgaaacaaatgttggagaaatgccgatagatgagcgtcgtatgatcgtattcgagtttatcaaaacatattctacacgtcctgcagattcgataacttatttgatgaataggtttaaaaatatagatatttatacccgctatgaaggaaagacattattacacgtagcatgtgaatataataatacacacgtaatagattatcttatacgtatcaacggagatataaatgcgttaaccgacaataacaaacacgctacacaactcattatagataacaaagaaaattccccatataccattaattgtttactgtatatacttagatatattgtagataagaatgtgataagatcgttggtggatcaacttccatctctacctatcttcgatataaaatcatttgagaaattcatatcctactgtatacttttagatgacacattttacaatagacacgttaggaatcgcgattctaaaacgtatcgatacgcattttcaaaatacatgtcgtttgataaatacgatggtataataactaaatgtcataaagaaacaatattgctcaaactatccactgttctagacactacactatatgcagttttaagatgccataattcgaaaaagttaagaagatacctcaccgagttaaaaaaatataataacgataagtcctttaaaatatattctaatattatgaatgagagataccttaatgtatattataaagatatgtacgtgtcaaaggtatatgataaactatttcctgttttcacagataaaaattgtctactaacattactaccttcagaaattatatacgaaatattatacatgctgacaattaacgatctttataatatatcgtatccacctaccaaagtatagttgtatttttctcatgcgatgtgtgtaaaaaaactgatattatataaatattttagtgccgtataataaagatgacgatgaaaatgatggtacatatatatttcgtatcattatcattattgttattgctattccacagttacgccatagacatcgaaaatgaaatcacagaattcttcaataaaatgagagatactctaccagctaaagactctaaatggttgaatccagcatgtatgttcggaggcacaatgaatgatatagccgctctaggagagccattcagcgcaaagtgtcctcctattgaagacagtcttttatcgcacagatataaagactatgtggttaaatgggaaaggctagaaaaaaatagacggcgacaggtttctaataaacgtgttaaacatggtgatttatggatagccaactatacatctaaattcagtaaccgtaggtatttgtgcaccgtaactacaaagaatggtgactgtgttcagggtatagttagatctcatattagaaaacctccttcatgcattccaaaaacatatgaactaggtactcatgataagtatggcatagacttatactgtggaattctttacgcaaaacattataataatataacttggtataaagataataaggaaattaatatcgacgacattaagtattcacaaacgggaaaggaattaattattcataatccagagttagaagatagcggaagatacgactgttacgttcattacgacgacgttagaatcaagaatgatatcgtagtatcaagatgtaaaatacttacggttataccgtcacaagaccacaggtttaaactaatactagatccaaaaatcaacgtaacgataggagaacctgccaatataacatgcactgctgtgtcaacgtcattattgattgacgatgtactgattgaatgggaaaatccatccggatggcttataggattcgattttgatgtatactctgttttaactagtagaggcggtattaccgaggcgaccttgtactttgaaaatgttactgaagaatatataggtaatacatataaatgtcgtggacacaactattattttgaaaaaacccttacaactacagtagtattggagtaaatatacaatgcatttttatatacattactgaataattattattattatttatatcgtatttgtgctataacgcgactatctaggtatttgtatctcactgatagagaacatataaatatagactctattaaacagttgtgtaaaatatcaaatcctaatagatgtggatgtacggctttacatgagtacttttataattatagatcagtcaacggaaaatacaagtatagatacaacggttactatcaatattattcatctagcgattatgaaaattataatgaatattattatgatgattatgatagaactggtatgaacagcgagagcgatagtgagagtgataatatatcaatcaaaacagaatatgagaatgaatatgaattctatgatgaaacacaagatcaaagtacacaactagtaggttacgacattaaactcaaaaccaatgaggatgattttatggctatgatagatcagtgggtgtccatgattatatagatgaatcaattaataaagtagtatatggaagagagtctcacgtaagatggcgggatatatggcaagaacataatgatggcgtatacagtataggaaaggagtgcatagataatatatacgaagacaaccataccgtagacgaattctacaagatagacagcgtatcagatgtagatgacgcggaacacatatctccgataactaatgatgtatctacacaaacatgggaaaagaaatcagagttagatagatacatggaaatgtatcctcgtcatagatatagtaagcattctgtctttaagggattttctgacaaagttagaaaaaatgatttagacatgaatgtggtaaaagaattactttctaacggtgcatctctaacaattaaggatagcagtaataaggatccaataaccgtttattttcgaagaacgataatgaatttagaaatgattgatgaacgaaagtatatagtacactcctatctaaaaaattataaaaatttcgattatccatttttcaggaagttagttttgactaataaacattgtctcaacaattattataatataagcgacagcaaatatggaacaccgctacatatattggcgtctaataaaaaattaataactcctaattacatgaagttattagtgtataacggaaatgatataaacgcacgaggtgaagatacacaaatgcgaactccattacacaaatatttgtgtaaatttgtatatcataatattgaatatggtatccgatactataatgaaaagattatagacgcatttatagagttaggagccgatctaactattccaaatgacgatggaatgataccagtagtttactgtatacactcaaatgccgaatatggttataacaatattactaacataaagataatacgtaaactacttaatcttagtagacgtgcgtcacataatctatttagagatcgagtcatgcacgattatataagtaatacatatattgatcttgagtgtttagatattattagatcgttggatggattcgatatcaatggttactttgaaggacgtacaccacttcattgcgctatacaacataacttcactcagattgctaagtacttattagatcgaggagctgatatagtcgtacccaacacattgattatacatcagtacatacagtaaatagcatagatatggaggaggatacaaatatttcaaataaagttatgagatacgacactgtcaataatatatgggaaacattacctaacttctggactggaactataaatccaggcgtggtctcgcataaagatgatatatatgttgtatgcgacatcaaagatgaaaaaaatgttaaaacttgtatatttagatataacacgaatacgtataacggatgggaattggtcacgacgacagaaagcagattatcagctctgcatactattctttataacaataccataatgatgttacattgttatgaatcgtatatgttacaagatacatttaatgtgtacactcgcgaatggaatcatatgtgtcatcaacattcgaatagttatatcatgtacaatatactacccatctactaaatataatagaataaaataaatgagtatgatcattttagataacgattgattttatcattaccgcttcattcttatattctttgcttacggaacctatatttagaaacatctactaacgattttttatgcttgcattattaatggtatgtaatatgattgattgtgtacgcaataccaatttgttaagtatgaatacggggtacaaacataaactgaagtttaacattatttatttatgatatatatcgttattgtttggtctataccatggatatctttaaagaactaatcttaaaacacacggatgaaaatgttttgatttctccagtttctattttatctactttatctattctaaatcatggagcagctggttctacagctgaacaactatcaaaatatatagagaatatgaatgagaatacacccgatgacaataatgacatggacgtagatattccgtattgtgcgacactagctaccgcaaataaaatatacggtagcgatagtatcgagttccacgcctccttcctacaaaaaataaaagacgattttcaaactgtaaactttaataatgctaaccaaacaaaggaactaatcaacgaatgggttaagacaatgacaaatggtaaaattaattccttattgactagtccgctatccattaatactcgtatgacagttgttagcgccgtccattttaaagcaatgtggaaatatccattttctaaacatcttacatatacagacaagttttatatttctaagaatatagttaccagcgttgatatgatggtgggtaccgagaataacttgcaatatgtacatattaatgaattattcggaggattctctattatcgatattccatacgagggaaactctagtatggtgattatactaccggacgacatagaaggtatatataacatagaaaaaaatataacagatgaaaaatttaaaaaatggtgtggtatgttatctactaaaagtatagacttgtatatgccaaagtttaaagtggaaatgacagaaccgtataatctggtaccgattttagaaaatttaggacttactaatatattcggatattatgcagattttagcaagatgtgtaatgaaactatcactgtagaaaaatttctacatacgacgtttatagatgttaatgaggagtatacagaagcatcggccgttacaggagtatttatgactaacttttcgatggtatatcgtacgaaggtctacataaaccatccattcatgtacatgattaaagacaccacaggacgtatactttttatagggaaatactgctatccgcaataaatataaacaaatagacttttatcacgtttatctatgtctaaatattacaaatagtaatagtataaactaaagctgataatacttaaaaaaataataatatcatttacaattaatagtataaactaaaaattaaacaaatcgttattataagtaatatcaaaatgatgatatacggattaatagcgtgtcttatattcgtgacttcatccatcgctagtccactttatattcccgttattccacccattacggaagataaatcgttcaatagtgtagaggtattagtttccttgtttagagatgaccaaaaagactatacggtaacttctcagttcaataactacactatcgataccaaagactggactatcggcgtactatccacacctgatggtttggatataccattgactaatataacttattggtcacggtttactataggtcgtgcattgttcaaatcagagtctgaggatattttccaaaagaaaatgagtattctaggtgtttctatagaatgtaagaagtcgtcgacattacttacttttttgaccgtgcgtaaaatgactcgagtatttaataaatttccagatatggcttattatcgaggagactgtttaaaagccgtttatgtaacaatgacttataaaaatactaaaactggagagactgattacacgtacctctctaatggggggttgcctgcatactatcgtaatggggtcgatggttgattattgattagtatattccttattcacacaaaaagaacatttttataaacatgaaaccactgtctaaatgtaattatgatcttgatttatagatgaagatcagcctttagaggattttaaccagtatgtttaatatgaaaaaaataaacataacatattttgagattaagcgctattgtgcttaattattttgctctataaactgaatatatagccacaattattgacgggcttgtttatgaccggcaatcatgaatttacagaaattatctctggctatatatcttactgcgacatgttcgtggtgttatgaaacatgcataagaaaaactgcgttgtatcatgacattcaattggagcatgtagaagacaataaagatagtgtagcgtcgctaccgtacaagtagtcaatcaaagagaacgtagtagattgttggctacatttaattggacagatatagctgagggtgttagaaatgagttcattaaaatatgtgatatcaacggaacatatttatataattatactattgctgttagtataattattgattccacggaagaactaccaacagttactccaattacaacaacatatgaaccttctacatataattatactatcgatgatagcactgttattactactgaagaactacaagtgactcctcatatggatctccatcgatgatacatgtattaaaatactttccgaataagtcttttaaatattgtattaattatgaaaaactatgctatgcgagtatgatgcaaagatgtttaatgatacgatactagattttatctctagcgagagatgtcgttagaatcatttatcataactacgtttaataataattcatcaacgaatatcgataacatgtgtcatttatacgttaaagtctgtccgtcttctctattgtttagactgtttgtagaatgctgtgatataaacaaactagtagaaggtacgactccgttacactgttatctaatgaatgaaggatttgaatcatctgttttaaaaaacctattaaaggagtatgtcatgaatacgtttaatgttcatgacatccattacacaaatatttaactcatgatgaagttgagaatgatatgctttctgatagtatagatagctttagctaatataaaaatatattaatccactatatattctagacttgatttaaaaccgataaactactacgtactgtataagttgttaagaaaaggagcagaccctaattatgcagatgatagaggtaatacttttcttcattacttctgcatctatatgtccacttatgagaaaacgtcatttaataagatgcatcgtgaaaagaaatttattaaagagttggtaaaatatgaaaccgaaagtaaataatataggaaatacacctctacataactacgtatctcaatatgatatcactctcattcctcatccacaacccattaaaaaaatggaaattaaagccctctattagcataaacggctacaggtctacctttacaatggcctttccttgtgcccagttcagaccctgtcattgccacgctactaaggactccctgaataccgtggccgacgtcagacattgtctgactgaatacatcctgtgggtttctcatagatggacccatagagaaactgcagggcctctctacaggcttctcatctctttcagaactgatgcaacggagctctttggtggtgagttgaaggattcacttccgtgggacaatatcgacaattgcgtggagatcattaaatgtttcatcagaaatgactccatgaaaaccgccgaagaacttcgtgcaatcattggactttgtactcaatcagctatcgtctctggaagagtcttcaacgataagtatatcgacatactacttatgctgcgaaagattctgaacgagaacgactatctcaccctcttggatcatatccgcactgctaaatactaaatctccttcatgctctctcactacactttttatcatcttatgaggaatgattgccttcatcatttttcgtgaaataggaataattagcaccagaatagctatggattgcacatgtattctatgtcgtctactggatgaagatgtgacgtacaaaaaaataaaactagaaattgaaacgtgtcacaacttatcaaaacatatagatagacgaagaaacaatgcgctacattgttacgtctccaataaatgcgatacagacattaagattgttcgactgttactctctcgcggagtcgagagacttcgtagaaacaacgaaggattaactccgctaggagtatacagtaagcatagatacgtcaaatctcaaattgtgcatctactgatatccagctattcgaattcctctaacgaactcaagtcgaatataaatgatttcgatctgtattcggataatatcgacttacgtctgctaaaatacctaattgtggataaacggatacgtccgtccaagaatacgaattatgcaatcaatagtctcggattggtggatatatacgtaacgacgcctaatccgagaccagaagtattgctatggcttcttaaatcagaatgttacagcaccggttacgtatttcgtacctgtatgtacaacagtgatatgtgtaagaactctcttcattactatatatcgtctcatagagaatctcaatctctatccaaggatgtaattaaatgtttgatcaataacaatgtttccatccatggcagagacgaaggaggatctttacccatccaatactactggtctttctcaaccatagatatagagattgttaaattattattaataaaggatgtggacacgtgtagagtatacgacgtcagccctatattagaggcgtattatctaaacaagcgatttagagtaaccccatataatgtagacatggaaatcgttaatcttcttattgagagacgtcatactcttgtcgacgtaatgcgtagtattacttcgtacgattccagagaatataaccactacatcatcgataacattctaaagagatttagacaacaggatgaatccatcgtacaagccatgttgataaactacttacattacggcgatatggtcgttcgatgcatgttagataacggacaacaactatcctctgcacgactactttgttaataataatctcgtcgatgtaaacgtcgtaaggtttatcgtggaaaatatggacacgcggctgtaaatcacatatctaacaatggccgtctatgtatgtacggtctgatattatcgagatttaataattgcgggtatcactgttatgaaaccatactaatagatgtatttgatatactaagcaagtacatggataatatagatatgatcgataatgagaataaaactctactatattacgcggtcgatgtcaataatatacaatttgcaaagcggttattggaatatggagcgagtgttacaacatcacgctcgataatcaatacggccatccagaaaagtagttacagaagagaaaacaaaacgaagctagttgatttattacttagctaccatcccactctagagactatgattgacgcatttaatagagatatacgctatctatatcctgaaccattatcggcatgtatcagatacgccttaatcatagatgatgattttccttctaaagtaagtatgatatcgccggtcatcataaggaactaaagcgctatagagtagacattaatagaatgaagaatgcctacatatcaggcgtctccatgtttgatatattatttaaacgaagcaaacgccacagattgagatacgcaaagaatccgacatcaaatggtacaaaaaagaactaacgtccatcattacagatactgtaaagaacagtgagaggatcgactccatagtggacaacattaatacagacgataacttgatttcgaaattacccatggagatactttattactccattaaataatttatcatggagcgataatgtcctgtttcatttgtttccatgacatattacaaaatcgattccgtccaagatgataaaaacatttaccggcatcataaacacggagtttattttatatgtctcgcataaacattactaaaaaaatatattgttcggttttctttcacatctttaattatgaaaaagtaaatcattatgagatggacgagattgtgagcatcgttcgcgacagtatgtggtacatacctaacgtatttatggacgacggtaagaatgaaggtcacgtttctgtcaacaatgtctgtcatatgtatttcacgttctttgatgtggatacatcgtctcatctgtttaagctagttattaaacactgcgatctgaataaacgaggtaactctccattacattgctatacgatgaatacacgatttaatccatctgtattaaagatattgttacaccacggcatgcgtaactttgatagcaaggatgaccactatcaatcgataacaagatctttgatatactaacggacaccattgatgactttagtaaatcatccgatctattgctgtgttatcttagatataaattcaatgggagcttaaactattacgttctgtacaaaggatccgaccctaattgcgccgacgaggatgaactcacttctcttcattactactgtaaacacatatccacgttctacaaaagcaattattacaagtcaagtcacactaagatgcgagccgagaagcgattcatctacgcgataatagattatggagcaaacattaacgcggttacacacttaccttcaacagtataccaaacatagtcctcgtgtggtgtatgctcttttatctcgaggatacgtaataatcttgattgtacacccatcatggaacgattgtgcaacaggtcatattctcataatgttactcaattggcacgaacaaaaggaagaaggacaacatctactttatctattcataaaacataatcaaggatacactctcaatatactacggtatctactagataggttcgacattcagaaagacgaatactataataccgcctttcaaaattgtaacaacaatgttgcctcatacatcggatacgacatcaaccttccgactaaagacggtattcgacttggtgtttgaaaacagaaacatcatatacaaggcggatgttgtgaatgacatcatccaccacagactgaaagtacctatgattaaatcgttgttctacaagatgtcagaattctctccctacgacgattactacgtaaaaaagatactagcctactgcctattaagggacgagtcattcgcggaactacatagtaaattctgtttaaacgaggactataaaagtgtatttatgaaaaatatatcattcgataagatagattccatcatcgtgacataagtcgccttaaagagattcgaatctccgacaccgacctgtatacggtatcacagctatcttaaagccatacattcagacagtcacatttcatttcccatgtacgacgatctcatagaacagtgccatctatcgatggagcgtaaaagtaaactcgtcgacaaagcactcaataaattagagtctaccatcgatggccaatctagactatcgtatttgcctccggaaattatgcgcaatatcatctaaacagtatgttgtacggaaagaaccattacaaatattatccatgatagaaagaaaatatctatatgattggagaagtaggaaacaggaacaagacgacgattactacattattaaatcatgaagtccgtattatactcgtatatattgtttctctcatgtataataataaacggaagagatatagcaccgcatgcaccatccgatggaaagtgtaaagacaacgaatacaaacgccataatttgtgtccgggaacatacgcttccagattatgcgaacacacaatgtacgccgtgtggttcgggtaccttcacatctcgcaataatcatttacccgcttgtctaagttgtaacggaagatgcgatcgtgtaacactactcacaatagaatctgtgaatgctctcccggatattattgtcttctcaaaggatcatccggatgcaaggcatgtgtttcccaaacaaaatgtggaataggatacggagtatccggagacgtcatctgttctccgtgtggtctcggaacatattctcacaccgtctcttccgcagataaatgcgaacccgtacccagaaatacctttaactatatcgatgtggaaattaatctgtatcccgtcaacgacacgtcgtgtactcggacgaccactaccggtctcagtgaatccatctcaacgtcggaactaactattactatgaatcataaagactgtaatcccgtatttcgtgatggatacttctctgtccttaataaggtagcaacttcaggtttctttacaggagaaaggtgtgcactctgaatttcgagattaaatgcaataacaaagattcttcctccaaacagttaacgaaagcaaagaatgatactatcatgccgcattcggagacagtaactctagcgtcgacatctatatactatatagtaataccaatactcaagactacgaaactgatacaatctcttatcatgtgggtaatgtagccatatgcccggtagttgcgatatacataaactgatcactaattccaaacccacccgctttttatagtaagtttttcacccataaatacaataattaatttctcgtaaaagtagaaaatatattctaatttattgcacggtaaggaagtagaatcataaagaacagtactcaatcaatagcaatcatgaaacaatatatcgtactggcatgcatgtgcctgccagtcttcagcaatcatcctcatcgtgtacggaagaagaaaacaaacatcatatgggaatcgatgttattatcaaagtcacaaagcaagaccaaacaccgaccgatgataagatttgccaatccgtaacggaaattacagagtccgagtcagatccagatcccgaggtggaatcagtcgaggatgtagatcctcctaccacttattactccatcatcggtggaggtctgagaatgaactttggattcaccaaatgtcctcagattaaatccatctcagaatccgctgatggaaagactgtgaggtgtctatcgacatcagatgtagcgaagaagagaaagacagcgacatcaagacccatccagtactcgggtctaacatctctcataagaaagtgagttacgaagatatcatcggttcaacgatcgtcgatacaaaatgcgtcaagaatctagagtttagcgttcgtatcggagacatgtgcaaggaatcatctgaacttgaggtcaaggatggattcaagtatgtcgacggatcggcatctgaaggtgcaaccgatgatacttcactcatcgattcaacaaaactcaaagcgtgtgtctgaatcgataactctattcatctgaaattggatgagtagggttaatcgaacgattcaggcacaccacgaattaaaaaagtgtaccggacactatattccggtttgcaaaacaaaaatgttcttaactacattcacaaaaagttacctctcgcgacttcttctttttctgtctcaatagtgtgatacgattatgacactattcctattcctattcctatttcctttcagggtatcacaaaaatattaaacctctttctgatggtctcataaaaaaagttttacaaaaatatttttattctctttctctctttgatggtctcataaaaaaagttttacaaaaatatttttattctctttctctctttgatggtctcataaaaaa

SEQ ID NO: 2 - DNA, 186491 bp, unidentified
  source 1..186491: mol_type = other DNA
catcttagtgtgacttgacttgtaataattgcttttgtagaacgtggatatgtgtttacagtagtaatgaagagaagtgagttcatcctcgtcggcgcaattagggtcggatcctttagtcaataatttgtacagaacgtagtagtttaagctcccattgaatttatatctaagataacacagcaatagatcggatgatttactaaagtcatcaatggtgtccgttagtatatcaaagatcttgttatcgattgatagtggtcatccttgctatcaaagttacgcatgccgtggtgtaacaatatctttaatacagatggattaaatcgtgtattcatcgtatagcaatgtaatggagagttacctcgtttattcagatcgcagtgtttaataactagcttaaacagatgagacgatgtatccacatcaaagaacgtaaaatacatatgacaaacattgttgacagaaacgtgaccttcattcttaccgtcgtccataaatacgttaggtatgtaccacatactgtcgcgaacgatgcgtacaatctcgtccatctcgcccatctcatacatttcatcatttactttttcataattagagatgtacgaaagaaaaagaaaaagaaaaagaaaaacagaacaatatatttttttagtaatgtttatgcgagacatataaaataaactccgtgtttatgatgccggtaaatgtttttatcatcttggacggaatcgattttgtaatatgtcatggaaacaaatgaaacaggacattatcgctccatgataaattatttaatggagtaataaagtatctccatgggtaatttcgaaatcaagttatcgtctgtattaatgttgtccactatggagtcgatcctctcactgttctttacagtatctgtaatgatggacgttagttcttttttgtaccatttgatgtcggattctttgcgtatctcaatctgtggcgtttgcttcgtttaaataatatatcaaacatggagacgcctgatatgtaggcattcttcattctattaatgtctactctatagcgctttagttccttatgatgaccggcgatatcatacttactttagaaggaaaatcatcatctatgattaaggcgtatctgatacatgccgataatggttcaggatatagatagcgtatatctctattaaatgcgtcaatcatagtctctagagtgggatggtaactcagtaataaatcaactagcttcgttttgttttctcttctgtaactacttttctggatggccgtattgattatcgagcgtgatgttgtaacactcgctccatattccaataaccgctttgcaaattgtatattattgacatcgaccgcgtaatatagtagagttttattctcattatcgatcatatctatattatccatgtacttgcttagtatatcaaatacatctattagtatggtttcataacagtgatacccgcaattattaaatctcgataatatcagaccgtacatacatagacggccattgttcgatacgtgatttacagccatgtgtccattattttccacgataaaccttacgacgtttacatcgacgagattattattaacaaagtagtcgtgcagaggatagttgttgtccgttatctaacatgcatcgaacgaccatatcgccgtaatgtaagtagtttatcaacatggcttgtacgatggattcatcctgttgtctaaatctctttagaatgttatcgatgatgtagtggttatagtctctggaatcgtaagaagtaatactacgcattacgtcgacaagagtatgacgtctctcaataagaagattaacgatttccatgtctacattatatggggttactctaaatcgcttgtttagataatccgcctctaatatagggctgacgtcgtatactctacacgtgtccacatcctttattaataatttaacaatctctatatctatggttgagcaagaccagtagtattggatgggtaaagatcctccttcgtctctgccatggatggaaacattgttattgatcaaacatttaattacatccttggatagagattgagattctctatgagacgatatatagtaatgaagagagttcttacacatatcactgtcgtacatacaggtacgaaatacgtaaccggtgctgtaacattctgatttaagaagccatagcaatacttctggtctcggattaggcgtcgttacgtatatatccaccaatccgagaccattgattgcataattcgtattcttggacggacgtatccgtttatccacaattaggtattttagcagacgtaagtcgatattatccgaagacatatacgaatacagatcgaaatcatttatattcgacttgagtttgttagaggaattcgaatagctggatatcagtagatgcacaatttgagatttgacgtatctatgcttactgtatgctcctagcggagttaatccttcgttgtttctacaaagtctctcgactccgcgagagagtaacagtcgaacaatcttaatgtctgtatcgcatttattgaagacgtaacaatgtagcgcattgtttcctcgtctatctatatgttttgataagttgtgacacgtttcaatttctagttttatttttttgtacgtcacatcttcatccagtagacgacatagaatacatgtgcaatccatagctattctggtgctaattattcctatttcacgaaaaatgatgaaggcaatcattcctcataagatgataaaaagtgtagtgagagagcatgaaggagatttagtatttagcagtgcggatatgatccaagagggtgagatagtcgttctcgttcagaatctttcgcagcataagtagtatgtcgatatacttatcgttgaagactcttccagagacgatagctgattgagtacaaagtccaatgattgcacgaagttcttcggcggttttcatggagtcatttctgatgaaacatttaatgatctccacgcaattgtcgatattgtcccacggaagtgaatccgagaactccttcaactcaccaccaaagagctccgttgcatcagttctgaaagagatgagaagcctgtagagagaccctgcgctttctctatgggtccatctatgagaaacccacaggatgtattcagtcagacaatgtctgacgtcggccacggtattcagggagtccttagtagcgtggcaatgacagggtctgaactgggcacaaggaaaggccattgtaaaggtagacctgtagccgtttatgctaatagagggctttaatttccatttttttaatgggttgtggatgaggaatgagagtgatatcatattgagatacgtagttatgtagaggtgtatttcctatattatttactttcggtttcatattttaccaactctttaataaatttcttttcacgatgcatcttattaaatgacgttttctcataagtggacatatagatgcagaagtaatgaagaaaagtattacctctatcatctacataattagggtctgctcctttttttaacaacttatacagtacgtagtagtagtttatcggttttaaatcaagtctagaatatatagtggattaatatatttttatattagctaaagctatctatactatcagaaagcatatcattctcaacttcatcatgagttaaatatttgtgtaatggatgtcatgaacattaaacgtattcatgacatactcctttaataggttttttaaaacagatgattcaaatccttcattcattagataacagtgtaacggagtcgtaccttctactagtttgtttatatcacagcattctacaaacagtctaaacaatagagaagacggacagactttaacgtataaatgacacatgttatcgatattcgttgatgaattattattaaacgtagttatgataaatgattctaacgacatctctcgctagagataaaatctagtatcgtatcattaaacatctttgcatcatactcgcatagcatagtttttcataattaatacaatatttaaaagacttattcggaaagtattttaatacatgtatcatcgatggagatccatatgaggagtcacttgtagttcttcagtagtaataacagtgctatcatcgatagtataattatatgtagaaggttcatatgttgttgtaattggagtaactgttggtagttcttccgtggaatcaataattatactaacagcaatagtataattatataaatatgttccgttgatatcacatattttaatgaactcatttctaacaccctcagctatatctgtccaattaaatgtagccaacaatctactacgttctctttgattgactacttgtacggtagcgacgctacactatctttattgtcttctacatgctccaattgaatgtcatgatacaacgcagtttttcttatgcatgtttcataacaccacgaacatgtcgcagtaagatatatagccagagataatttctgtaaattcatgattgccggtcataaacaagcccgtcaataattgtggctatatattcagtttatagagcaaaataattaagcacaatagcgcttaatctcaaaatatgttatgtttatttttttcatattaaacatactggttaaaatcctctaaaggctgatcttcatctataaatcaagatcataattacatttagacagtggtttcatgtttataaaaatgttctttttgtgtgaataaggaatatactaatcaataatcaaccatcgaccccattacgatagtatgcaggcaaccccccattagagaggtacgtgtaatcagtctctccagttttagtatttttataagtcattgttacataaacggcttttaaacagtctcctcgataataagccatatctggaaatttattaaatactcgagtcattttacgcacggtcaaaaaagtaagtaatgtcgacggcttcttacattctatagaaacacctagaatactcattttcttttggaaaatatcctcagactctgatttgaacaatgcacgacctatagtaaaccgtgaccaataagttatattagtcaatggtatatccaaaccatcaggtgtggatagtacgccgatagtccagtctttggtatcgatagtgtagttattgaactgagaagttaccgtatagtctttttggtcatctctaaacaaggaaactaatacctctacactattgaacgatttatcttccgtaatgggtggaataacgggaatataaagtggactagcgatggatgaagtcacgaatataagacacgctattaatccgtatatcatcattttgatattacttataataacgatttgtttaatttttagtttatactattaattgtaaatgatattattatttttttaagtattatcagctttagtttatactattactatttgtaatatttagacatagataaacgtgataaaagtctatttgtttatatttattgcggatagcagtatttccctataaaaagtatacgtcctgtgttgtctttaatcatgtacatgaatggatggtttatgtagaccttcgtacgatataccatcgaaaagttagtcataaatactcctgtaacggccgatgcttctgtatactcctcattaacatctataaacgtcgtatgtagaaatttttctacagtgatagtttcattacacatcttgctaaaatctgcataatatccgaatatattagtaagtcctaaattttctaaaatcggtaccagattatacggttctgtcatttccactttaaactttggcatatacaagtctatacttttagtagataacataccacaccattttttaaatttttcatctgttatatttttttctatgttatatataccttctatgtcgtccggtagtataattaccatactagagtttccctcgtatggaatatcgataatagagaatcctccgaataattcattaatatgtacatattgtaagtcgttctcagtgctcaccatcatatcaacgctggtaactatattcttagaaatataaaacttgtctgtatatgtaagatgtttagaaaatggatatttccacattgctttaaaatggacggcgctaacaactgtcatacgagtattaatggatagcggactagtcaataaggaattaattttaccatttgtcatcgtcttaacccattcgttgattagttcctttgtttggttagcattattaaagtttacagtttgaaaaccgtcttttattttttgtaggaaggaggcgtggaactcgatactatcgctacagtatattttatttgcggtagctagtgtcgcacaatacggaatatctacgtccatgtcattattgtcatccttcttatcatcgggtgtattctcattcacattctctatatattttgatagttgttcagctgtagaaccagctgctccatgatttagaatagataaagtagataaaatagaaactggagaaatcaaaacattttcatcagggtgttttaagattagttctttaaagatatccatggtatagaccaaacaataacgataacgatatatatcataaataaataatgttaaatttcagtttatgtttgtaccccgtattcatacttaacaaattggtattgcgtacacaatcaatcatattacataccattaataatgcaagcataaaaaatcgttagtagatgtttctaaatataggttccgtaagcaaagaatataagaatgaagggtaatgataaaatcaatcgttatctaaaatgatcatactcatttattttattctattatattaacacatacatttttaacagcaacacattcaatattgtattgttatttttatattatttacacaattaacaatatattattagtttatattactgaattaataatataaaattcccaatcttgtcataaacacacactgagaaacagcataaacacaaaatccatcaaaaatgtcgatgaaatatctgatgttgttgttcgctgctatgataatcagatcattcgccgatagtggtaacgctatcgaaacgacattgccagaaattacaaacgctacaacagatattccagctatcagattatgcggtccagagggagatggatattgtttacacggtgactgtatccacgctagagatatcgacggtatgtattgtagatgctctcatggttatacaggcattagatgtcagcatgtagtattagtagactatcaacgttcagaaaaaccaaacactacaacgtcatatatcccatctcccggtattgtgcttgtattagtaggcattattatgtgttgtctattatctgtttataggttcactcgacgaactaaactacctatacaagatatggttgtgccataatttttataaattttttttatgagtatttttacaaaaatgtataaagtgtatgtcttatgtatatttataaaaatgctaaatatgcgatgtatctatgttatttgtatttatctaaacaatacctctacctctagatattatacaaaaattttttatttcagcatattaaagtaaaatctagttaccttgaaaatgaatacagtgggtggttccgtatcaccagtaagaacataatagtcgaatacagtatccgattgagattttgcatacaatactagtctagaaagaaatttgtaatcatcttctgtgacgggagtccatatatctgtatcatcgtctagtttatcagtgtcccatgctatatttctgttatcatcattagttaatgaaaataactctcgtgcttcagaaaagtcaaatattgtatccatacatacatctccaaaactatcgcttatacgtttatctttaacgatacctatacctagatggttatttactaacagacattttccagatctattgactataactcctatagtttccacatcaaccaagtaatgatcatctattgttatataacaataacataactcttttccgtttttatcagtatgtatatctatattaacgtcgtcgttgtagtgaatagtagttattgatctattatatgaaacggatatgtctagaacagcaattgtcttacgtccagttaacactttcgttgatttaaagtctagagtctttgcaaacataatatccttatccgactttatatttcctgtagggtggtataattttattttgcctccacatatcggtgtttccaaatatattactagacaatattccatatagttattagttaagggtacccaattagaacacgtacgcttattatcatcatttggatcgtatttcataaaagttattgtactatcgatgtcaacacattctacattttttaatcgtctatatagtatttttctgatattttctataatatcagaattgtcttccatcggaagttgtatactatcggaatcagttacatgtttaaataattctctgatgtcattccttatacaatcaaattcattattaaacagtttaatagtctgtagacctttatcgtcgtaaatatccattgtcttattagttacgcttatttttatgtgttttacgttgctttattatattttataagaatgattgtttgacgaatcacgagaactattaagacacattattaggtatatattataaaaaagtttttgattacgatgttataagaggaaagaggacacattaacatcatacatcaattaactacattcttataacatcgtaatcaaaagaattgcaattttgatgtataacaactgtcaatgggttatggaattgtatattacatattatacggtatgttggtaacgacaaataccgatcggtaattgtctgccggtgtaatagaattatatatatctatctattacaccggccttgtatacataataataagttgtggtagtatgatctccatatttataatttaggactttgtattcagtatttttggaatcataaaaaataaaaaaaagttttactaatttaaaatttaaaaagtatttacatttttttcactgtttagtcgcggatatggaattcgatcctgccaaaatcaatacatcatctatagatcatgtaacaatattacaatacatagatgaaccaaatgatataagactaacagtatgcattatccgaaatattaataacattacatattatatcaatatcacaaaaataaatacacatttggctaatcaatttcgggcttggaaaaaacgtatcgccggaagggactatatgactaacttatctagagatacaggaatacaacaatcaaaacttactgaaactatacgtaactgtcaaaaaaatagaaacatatatggtctatatatacactacaatttagttattaatgtggttattgattggataaccgatgtgattgttcaatcaatattaagagggttggtaaattggtacatagctaataatacctatactccaaatacacccaataatacaacaaccatttctgagttggatatcatcaaaatactggataaatacgaggacgtgtatagagtaagtaaagaaaaagaatgtggaatttgctatgaagttgtttactcaaaacgattagaaaacgatagatactttggtttattggattcgtgtactcatatattttgcataacatgcatcaatatatggcataaaacacgaagagaaaccggtgcgtcggataattgtcctatatgtcgtacccgttttagaaacataacaatgagcaagttctataagctagttaactaataaataaaaagtttaatttgttgacgacgtatgtcgttattttttctcgtataaaagattaatttgattctaatataatctttagtattggataaatatcaattcaaattaattccattagattatatcataaataaaaatagtagcacgcactacttcagccaaatattcttttttgaaacgccatctatcgtagtgaggacacaagtgaacctataatgagcaaatttattagtatcggttacatgaaggactttacgtagagtggtgattccactatctgtggtacgaacggtttcatcttctttgatgccatcacccagatgttctataaacttggtatcctcgtccgatttcatatcctttgccaaccaatacatatagctaaactcaggcatatgttccacacatcctgaacaatgaaattctccagaagatgttacaatgtctagatttggacatttggtttcaaccgcgttaacatatgagtgaacacacccatacatgaaagcgatgagaaataggattttcatcttgccaaaatatcactagaaaaaatttatttatcaattttaaaggtataaaaaatacttattgttgctcgaatattttgtatttgatggtatacggaagattagaaatgtaggtattatcatcaactgattctatggttttatgtattctatcatgtttcactattgcgttggaaataatatcatatgcttccacatatattttattttgttttaactcataatactcacgtaattctggattattggcatatctgtgaataattttagctccatgatcagtaaatattaatgagaacatagtattaccacctaccattatttttttcatttcgttcaattcttgattgcaaagatctatataatcattatagcgttgacttatggactctggaatcttagacgatgtacaggcatctataatcatggcatatttaatacattgttttatagcatagtcgttatctacgatgttagatatttctctcaatgaatcaatcacacaatctaatgtaggtttatgacataatagcattttcagcagttcaatgtttctagattcgttgatggcaatggctatacatgtatatccgttatttgatctaatgttgacatctgaaccggattctagcagtaaagatactagagattgtttattatatctaacagccttgtgaagaagtgtttctcctcgtttgtcaatcatgttaatgtctttaagataaggtaggcaaatgtttatagtactaagaattgggcaagcataagacatgtcacaaagaccctttttgtatgtataagtgtagaaattataacatccatagttggatttacataggtgtccaatcgggatctctccatcatcgagatgattgacggcatctcccccttccttttttagtagatatttcatcgtgtaagaatcaatattaatatttctaaagtatccgtgtatagcctctttatttaccacagctccatattccaacatgcattccactaaagggatatcgatatcgccgaatgtcatatactcaattagtatatgttggaggacatccgagttcattgttttcaatatcaaagagatggtttccttatcatttctccatagtggtacaatactacacattattccgtgaggctttccattctccaaaaacaatttgaccaaatctacatctttattgtatctataatcactatttagataatcagccataattactcgagtgcaacatgttagatcgtctatatatgaataagccgtgttatctattcctttcattaacaatttaacgatgtctatatctatatgagatgacttaatataatattgaagagctgtacaatagtttttatctatagaagacggcttgattccgtgattaattagacatttaacaacttccggacgcacatatgctctcgtatccgactctgaatacagatgagagatgatatacagatgcaatacggtaccgcaatttcgtagttgataatcatcatacgcgtatccgtactcgtcctcataaagaacactgcagccattttctatgaacaaatcaataattttaggaacaggatcattgtcattacataattttctataactgaacgatggttttcacatttaacactcaagtcaaatccatgttctaccaacacctttatcaagtcaacgtctacatttttggatttcatatagctgaatatattaaagtcatttatgttgctaaatccagtggcttctagtagagccatcgctatatcctttaactttaacatgtctactatttgtgtattcttctaatggggtagctgtctccaatttttgcgtaatggattagtgccactgtctagtagtagtttgacgacctcgacattattacaatgctcattaaaaaggtatgcgtgtaaagcattattcttgaattggttcctggtatcattaggatctctgtctctcaacatctgtttaacttcatcgagagccacctcctcattttccaaatagtcaaacattttgactgaatagaagtgaatgagctactgtgaactctatacacccacacaactaatgtcattaaatattatttttttgaatgtatttataccatgtcaaaaacttgtacaattattaataaaaataatttagtgtttaaattttaccagttccagattttacacctccgttaaccccactttttacaccactggacgatcctcctccccacattccaccgccaccagatgtataagttttagatcctttattactaccatcatgtccatggataaagacactccacatgccgccactaccccctttagaagacatattaataagacttaagagttaaggacaagtttaacaataaaattaatcacgagtaccctactaccaacctacactattatatgattatagtttctatttttacagtaccttaactaaagtttctagtcacaagagcaatactaccaacctacactattatatgattatagtttctatttttataggaacgcgtacgagaaaatcaaatgtctaatttctaacggtagtgttgataaacgattatcgtcaatggatacctcctctatcatgtcgtctattttcttactttgttctattaacttattagcattatatattatttgattataaaacttatattgcttattagcccaatctgtaaatatcggattattaacatatcgtttctttgtaggtttatttaacttgtacatcactgtaagcatgtccgtaccatttattttaatttgacgcatatccgcaatttctttttcgcagtcggttataaattctatatatgatggatacatgctacatgtgtacttataatcgactaatatgaagtacttgatacatattttcagtaacgatttattattaccacctatgaataagtacctgtgatcgtctaggtaatcaactgttttcttaatacattcgatggttggtaatttactcagaataatttccaatatcttaatatataattctgctatttctggaatatatttatctgccagtataacacaaatagtaatacatgtaaacccatattttgttattatattaatgtctgcgccattatctattaaccattctactaggctgacactatgcgacttaatacaatgataaagtatactacatccatgtttatctattttgtttatatcatcaatatacggcttacaaagttttagtatcgataacacatccaactcacgcatagagaaggtagggaataatggcataatatttattaggttatcatcattgtcattatctacaactaagtttccattttttaaaatatactcgacaactttaggatctctattgccaaatttttgaaaatatttatttatatgcttaaatctatataatgtagctccttcatcaatcatacatttaataacattgatgtatactgtatgataagatacatattctaacaatagatcttgtatagaaactgtatatcttttaagaattgtggatattaggatattattacgtaaactattacacaattctaaaatataaaacgtatcacggtcgaataatagttgatcaactatataattatcgattttgtgatttttcttcctaaactgtttacgtaaatagttagatagaatattcattagttcatgaccactatagttactatcgaataacgcgtcaaatatttcccgtttaatatcgcatttgtcaagataataatagagtgtggtatgttcacgataagtataataacgcatctctttttcgtgtgaaattaaatagtttatcacgtccaaagatgtagcataaccatcttgtgacctagtaataatataataatagagaactgttttacccattctatcatcataatcagtggtgtagtcgtaatcgtaatcgtctaattcatcatcccaattataatattcaccagcacgtctaatctgttctattttgatcttgtatccatactgtatgttgctacatgtaggtattcctttatccaataatagtttaaacacatctacattgggatttgatgttgtagcgtatttctctacaatattaataccatttttgatactatttatttctatacctttcgaaattagtaatttcaataagtctatatcgatgttatcagaacatagatattcgaatatatcaaaatcattgatatttttatagtcgactgacgacaataacaaaatcacaacatcgtttttgatattattatttttcttggtaacgtatgcctttaatggagtttcaccatcatactcatataatggatttgcaccactttctatcaatgattgtgcactgctggcatcgatgttaaatgttttacaactatcatagagtatcttatcgttaaccatgattggttgttgatgctatcgcattttttggtttctttcatttcagttatgtatggatttagcacgtttgggaagcataagctcatatgatttcagtactgtagtgtcagtactattagtttcgatcagatcaatgtctagatctatagaatcaaaacacgataggtcagaagataatgaatatctgtaggcttcttgttgtactgtaacttctcgttttgttagatggttgcatcgtgctttaacatcaatggtacaaattttatcctcgctttgtgtatcatattcgtccctactataaaattgtatattcagattatcatgagatgtgtatacgctaacggtatcaataaacggagcacaccatttagtcataaccgtaatccaaaaatttttaaagtatatcttaacgaaagaagttgtgtcattgtctacggtgtatggtactagatcctcataagtgtatatatctagagtaatgtttaatttatcaaatggttgataatatggatcctcatgacaatttcctaagacgaaaataagacataaacacgcaataaatctaattgcggacatggttactccttaaaaaaatacgaataatcaccttggctatttagtaagtgtcatttaacactatactcatattaatccatggactcataatctctatacgggattaacggatgttctatatacggggatgagtagttttcttctttaactttatactttttactaatcatatttagactgatgtatgggtaatagtgtttgaagagctcgttctcatcatcagaataaatcaatatctctgtttttttgttatacagatgtattacagcctcatatattacgtaatagaacgtgtcatctaccttattaactttcaccgcatagttgtttgcaaatacggttaatcctttgacctcgtcgatttccgaccaatctgggcgtataatgaatctaaactttaatttcttgtaatcattcgaaataatttttagtttgcatccgtagttatcccctttatgtaactgtaaatttctcaacgcgatatctccattaataatgatgtcgaattcgtgctgtatacccatactgaatggatgaacgaataccgacggcgttaatagtaatttactttttcatctttacatattgggtactagttttactatcataagtttataaattccacaagctactatggaataagccaaccatcttagtataacacacatgtcttaaagtttattaattaattacatgttgttttatatatcgctacgaatttaaacagagaaatcagtttaggaaaaaaaattatctatctacatcatcacgtctctgtattctacgatagagtgctactttaagatgagacatatccgtgtcatcaaaaatatactccattaaaatgattattccggcagcgaacttgatattggatatatcacaacctttgttaatatctacgacaatagacagcagtcccatggttccataaacagtgagtttatctttctttgaagagatattttgtagagatcttataaaactgtcgaatgacatcgcatttatatctttagctaaatcgtatatgttaccatcgtaatatctaaccgcgtctatcttaaacgtttccatcgctttaaagacgtttccgatagatggtctcatttcatcagtcatactgagccaacaaatataatcgtgtataacatctttgatagaatcagactctaaagaaaacgaatcggctttattatacgcattcatgataaacttaatgaaaaatgtttttcgttgtttaagttggatgaatagtatgtcttaataattgttattatttcattaattaatatttagtaacgagtacactctataaaaacgagaatgacataactaatcataactagttatcaaagtgtctaggacgcgtaattttcatatggtatagatcctgtaagcattgtctgtattctggagctattttctctatcgcattagtgagttcagaatatgttataaatttaaatcgaataacgaacataactttagtaaagtcgtctatattaactcttttattttctagccatcgtaataccatgtttaagatagtatattctctagttactacgatctcatcgttgtctagaatatcacatactgaatctacatccaattttagaaattggtctgtgttacatatctcttctatattattgttgatgtattgtcgtagaaaactattacgtagaccattttctttataaaacgaatatatagtactccaattatctttaccgatatatttgcacacataatccattctctcaatcactacatctttaagattttcgttgttaagatatttggctaaactatataattctattagatcatcaacagaatcagtatatatttttctagatccaaagacgaactctttggcgtcctctataatattcccagaaaagatattttcgtgttttagtttatcgagatctgatctgttcatatacgccatgattgtacggtacgttatgataaccgcataaaataaaaatccattttcatttttaaccaatactattcataattgagattgatgtaatactttgttactttgaacgtaaagacagtacacggatccgtatctccaacaagcacgtagtaatcaaatttggtgttgttaaacttcgcaatattcatcaatttagatagaaacttatactcatcatctgttttaggaatccatgtattattaccactttccaacttatcattatcccaggctatgtttcgtccatcatcgttgcgcagagtgaataattcttttgtattcggtagttcaaatatatgatccatgcatagatcggcaaagctattgtagatgtgatttttcctaaatctaatataaaactcgtttactagcaaacactttcctgatttatcgaccaagacacatatggtttctaaatctatcaagtggtggggatccatagttatgacgcagtaacatatattattacattcttgactgtcgctaatatctaaatatttattgttatcgtattggattctgcatatagatggcttgtatgtcaaagatatagaacacataaccaatttatagtcgcgctttacattctcgaatctaaagttaagagatttagaaaacattatatcctcggatgatgttatcactgtttctggagtaggatatattaaagtctttacagatttcgtccgattcaaataaattactaaataatatcccacattatcatctgttagagtagtatcattaaatctattatattttatgaaagatatatcactgctcacctctatatttcgtacatttttaaactgtttgtataatatctctctgatacaatcagatatatctattgtgtcggtagacgataccgttacatttgaattaatggtgttccattttacaacttttaacaagttgaccaattcatttctaatagtatcaaactctccatgattaaatattttaatagtatccattttatatcactacggacacaaagtagctgacataaaccattgtataatttttatgttttatgtttattagcgtacacattttggaagttccggctgccatgtatttcctggagagcaagtagatgatgaggaaccagataggttatatccgtacttgcacttaaagtttacattgtcgttgtatgagtatgatcttttaaacccgctagacaagtatccgtttgatattgtaggatgtggacatttaacaatctgacacgtgggtggatcggaccattctcctcctgaacacaggacaccagagttaccaatcaacgaatatccactattgcaactataagttacaacgctcccatcggtataaaaatcctcgtatccgttatgtcttccgttggatatagatggaggggattggcatttaacagattcacaaataggtgcctcgggattccataccatagatccagtagatcctaattcacaatacgatttagattcaccgatcaaatgatatccgctattacaagagtacgttatactagagccaaagtctactccgccaatatcaagttggccattatcgatatctcgaggcgatgggcatctccgtttaatacattgattaaagagtgtccatccagtacctgtacatttagcatatataggtcccattttttgctttctgtatccaggtagacatagatattctatagtgtctcctatgttgtaattagcattagcatcagtctccacactattcttaaatttcatattaatgggtcgtgacggaatagtacagcatgatagaacgcatcctattcccaacaatgtcaggaacgtcacgctctccaccttcatatttatttatccgtaaaaatgttatcctggacatcgtacaaataataaaaagcccatatatgttcgctattgtagaaattgtttttcacagttgctcaaaaacgatggcagtgacttatgagttacgttacactttggagtttcatctttagtaaacatatcataatattcgatattacgagttgacatatcgaacaaattccaagtatttgattttggataatattcgtattttgcatctgctataattaagatataatcaccgcaagaacacacgaacatctttcctacatggttaaagtacatgtacaattctatccatttgtcttccttaactatatatttgtatagataattacgagtctcgtgagtaattccagtaattacatagatgtcgccgtcgtactctacagcataaactatactatgatgtctaggcatgggagacttttttatccaacgatttttagtgaaacattccacatcgtttaatactacatatttttcatacgtggtataaactccacccattacatatatatcatcgtttacgaataccgacgcgcctgaatatctaggagtaattaagtttggaagtcttatccattttgaagtgccgtgtttcaaatattctgctacacccgttgaaatagaaaattctaatcctcctattacatataactttccattgttaacacaagtactaacttctgattttaacgacgacatattagtaaccgttttccattttttcgtttcaagatctacccgcgatacggaataaacatgtctattgttaatcatgccgccaataatgtatagacaattatgtaaaacatttgcattatagaattgtctatctgtattaccgactatcgtccaatattctgttctaggagagtaatgggttattgtggatatataatcagagtttttaatgactactatattatgttttataccatttcgtgtcactggctttgtagatttggatatagttaatcccaacaatgatatagcattgcgcatagtattagttataaacttgggatgtaaaatgttgatgatatctacatcgtttggatttttatgtatccactttaataatatcatagctgtaacatcctcatgatttacgttaacgtcttcgtgggataagatagttgtcagttcatcctttgataattttccaaattctggatcggatgtcaccgcagtaatattgttgattatttctgacatcgacgcattatatagttttttaattccatatcttttagaaaagttaaacatccttatacaatttgtggaattaatattatgaatcatagtttttacacatagatctactacaggcggaacatcaattattatggcagcaactagtatcatttctacattgtttatggtgatgtttatcttcttccagcgcatatagtctaatagcgattcaaacgcgtgatagtttataccattcaatataatcgcttcatcctttagatggtgatcctgaatgcgtttaaaaaaattatacggagacgccgtaataatttccttattcacttgtataatttccccattgatagaaaatatcacgctttccattcttgaagtactataagtaattatagtataatgtaaaggtttatatattcaatattttttataaaaaaatcatttcgacattaattcctttttaaatttccgtctatcatctatagaaacatattctatgaatttataaaatgcttttacgtgtcctatcgtaggcgatagaaccgctaaaaagcctattgaatttctacaaaagaatctattatatggtatagggagagtataaaacattaaatgcccgtacttattaaagtattcagtagccaatcctaactctttcgaatacttattaatggctcttgttctgtacgaatctatttttttgaacaacggacctagtggtatatcttgttctatgtatctaaaataatgtctgactagatccgttagtttaatatcctcagtcatcttgtctagaatggcaaatctaactgcgggtttaggctttagtttagtttctatatctacatctatgtctttatctaacaccaaaaatataatagctaatattttattacaatcatccggatattcttctacgatctcactaactaatgtttctttggttatactagtatagtcacgatcagacaaataaagaaaatcagatgatcgatgaataatacatttaaattcatcatctgtaagatttttgagatgtctcattaaaatattattagggtcagtactcattatcattaggcagctattacttattttattatttttcaccatatagatcaatcattagatcatcaaaatatgtttcaatcatcctaaagagtatggtgaatgactcttcccatctaatttctgaacgttcaccaatgtctctagccactttggcactaatagcgatcattcgcttagcgtcttctatattattaactggttgattcaatctatctagcaatggaccgtcggacagcgtcattctcatgttcttaatcaatgtacatacatcgccgtcatctaccaattcatccaacaacataagctttttaaaatcatcattataataggtttgatcgttgtcatttctccaaagaatatatctaataagtagagtcctcatgcttagtaatttaactattttagttaacaactattttttatgttaaatcaattagtacaccgctatgtttaatacttattcatattttagtttttaggattgagaatcaatacaaaaattaatgcatcattaattttagaaatacttagtttccacgtagtcaatgaaacatttgaactcatcgtacaggacgttctcgtacaggacgtaactataaaccggtttatatttgttcaagatagatacaaatccgataacttttttgacgaattctacgggatccactttaaaagtgtcataccgggttctttttattcttttaaacagatcaatggtgtgatgttgattaggtcttttacgaatttgatatagaatagcgtttacatattctccataatggtcaatcgccatttgttcgtatgtcataaattctttaattatatgacactgtgtattgtttagttcatccttgttcattgttaggaatctatccaaaatggcaattatactagaactataggtgcgttgtatacacatattgatgtgtctgtttatacaatcaatgatatttggatccatgctactaccttcgggtaaaattgtagcatcatataccatttctagtactttaggttcattgttatccattgcagaggacgtcatgatcgcatcctaaaaaaatatattatttttatgttattttgttaaaaataatcatcgaatacttcgtaagatactccttcatgaacataatcagttacaaaacgtttatatgaagtaaagtatctacgatttttacaaaagtccggatgcataagtacaaagtacgcgataaacggaataataatagatttatctagtctatctttttctatagctttcatagttagatacatggtctcagaagtaggattatgtaacatcagcttcgataaaatgactgggttatttagtcttacacattcgctcatacatgtatgaccgttaactacagagtctacactaaaatgattgaacaatagatagtctaccattgtttcgtattcagatagtacagcgtagtacatggcatcttcacaaattatatcattgtctaatagatatttgacgcatcttatggatcccacttcaacagccatcttaaaatcggtagaatcatattgctttcctttatcattaataatttctagaacatcatctctatcataaaagatacaaatattaactgtttgatccgtaataacattgctagtcgatagcaatttgttaataagatgcgctgggctcaatgttttaataagaagtgtaagaggactatctccgaatttgttttgtttattaacatccgttgatggaagtaaaagatctataatgtctacattcttgactgttttagagcatacaatatggagaggtgtatttccatcatgatctggttttgagggactaattcctagtttcatcatccatgagattgtagaagcttttggattgtctgacataagatgtctatgaatatgatttttgccaaatttatccactatcctggcttcgaatccgatggacattatttttttaaacactctttctgaaggatctgtacacgccaacaacggaccacatccttcttcatcaaccgagttgttaatcttggctccatactgtaccaataaatttattctctctatgacttcatcatctgttcccgagagataatatagaggtgttttattatgtttatcacacgcgtttggatctgcgccgtgcgtcagcagcatcgcgactattctattattattaattttagaagctatatgcaatggataatttccatcatcatccgtctcatttggagagtatcctctatgaagaagttcttcgacaaatcgttcatctagtcctttaattccacaatacgcatgtagaatgtgataattatttccagaaggttcgatagcttgtagcatattcctaaatacatctaaatttttactattatatttggcataaagagatagataatactcggccgacataatgttgtccattgtagtataaaaattaatatttctatttctatttctgtatatttgcaacaatttactctctataacaaatatcataacttagttcttttatgtcaagaaggcactggtttagttcatctataaatgtcacgccataactaccacgcatgccatactcagaattatgataaagatatttatccttggggtgtaggtaatggggattaatctttgttggatcagtctctaagttaacacatgtcacacatgatccatttatagttatatcacacgatgatgatttatgaattgattccggaagatcgctatcgtattttgtggttccacaattcatttccatacatgttattgtcacactaatattgtgatgaactttatctagccgctgagtggtaaacaacagaacagatagtttattatctttaccaacaccctcagccgctgccacaaatctctgatccgtatccatgatggtcatgtttatttctagtccgtatccagtcaacactatgttagcatttctgtcgatatagctttcactcatatgacactcaccaataatagtagaattaatgtcataatttacaccaatagtgagttcggcggcaaagtaccaataccggtaatcttgtcgaggaggacatatagtattcttgtattctaccgaatacccgagagatgcgatacaaaagagtaagactaatttgtaaaccatcttactcaaaatatgtaacaatagtacgatgcaatgagtaagacaataggaaatctatcttatatacacataattattctatcaattttaccaattagttagtgtaatgttaacaaaaatgtggtagaatctaattagtttttccttacacaattgacgtacatgagtctgagttccttgtttttgctaattatttcatccaatttattattcttgactatatcgagatcttttgtataggagtcagacttgtattcaacatgcttttctataatcattttagctatttcggcatcatccaatagtacattttccagattagcagaatagatattaatgtcgtatttgaacagagcctgtaacatctcaatgtctttattatctatagccaatttaatgtccggaatgaagagaagggaattattggtgtttgtcgacgtcatatagtcgagcaagagaatcatcatatccacgtgtccattttttatagtggtgtgaatacaactaaggagaatagccagatcaaaagtagatggtatttctgaaagaaagtatgatacaatacttacatcattaagcatgacggcatgataaaatgaagttttccatccagttttcccatagaacatcagtctccaatttttcttaacaaacagttttaccgtttgcatgttaccactatcaaccgcataatacaatgcagtgtttcccttgtcatcaaattgtgaatcatccagtccactgaatagcaaaatctttactattttggtatcttccaatgtggctgcctgatgtaatggaaattcattctctagaagatttttcaatgctccagcgttcaacaacgtacatactagacgcacgttattatcagctattgcataatacaaggcactatgtccatggacatccgccttaaatgtatctttactagagagaaagcttttcagctgcttagacttccaagtattaattcgtgacagatccatgtctgaaacgagacgctaattagtgtatattttttcattttttataattttgtcatattgcaccagaattaataatatctctaatagatctgattagtagatacatggctatcgcaaaacaacatatacacatttaataaaaataatatttattaagaaaattcagatttcacgtacccatcaatataaataaaataatgattccttacaccgtacccatattaaggagattccaccttacccataaacaatataaatccagtaatatcatgtctgatgatgaacacaaatggtgtattaaattccagttcttcaggagatgatctcgccgtagctaccatgatagtagatgcctctgctacagttccttgttcgtcgacatctatctttgcattctgaaacattttataaatatataatgggtccctagtcatatgtttaaacgacgcattatctggattaaacatactaggagccatcatttcggctatcgacttaatatccctcttattttcgatagaaaatttagggagtttaagattgtacactttattccctaattgaaacgaccaatagtctaattttgcagccgtaatagaatctgtgaaatgggtcatattatcacctattgccaggtacatactaatattagcatccttatacggaaggcgtaccatgtcatattctttgtcatcgattgtgattgtatttccttgcaatttagtaactacgttcatcatgggaaccgttttcgtaccgtacttattagtaaaactagcattgcgtgttttagtgatatcaaacggatattgccatgtacctttaaaatatatagtattaatgattgcccatagagtattattgtcgagcatattagaatctactacattagacataccggatctacgttctactatagaattaattttattaaccgcatctcgtctaaagtttaatctatataggccgaatctatgatattgttgataatacgacggtttaatacacacagtattatctacgaaactttgataagttagatcagtgtacgtatatttagatgttttcagcttagctaatcctgatattaattctgtaaatgctggacccagatctctttttctcaaatccatagtcttcaataattctattctagtattacctgatgcaggcaatagcgacataaacatagaaaacgaataaccaaacggtgagaagacaatattatcatcttgaatatttttatacgctactataccggcattggtaaatccttgcagacgataggtagacactgaacacgttaacgatagtatcaataacgcaatcatgattttatggtattaataattaaccttatttttatgttcggtataaaaattattgatgtctacacatccttttgtaattgacatctatatatccttttgtataatcaactctaatcactttaacttttacagttttccctaccagtttatccctatattcaacatatctatccatatgcatcttaacactctctgccaagatagcttcagagtgaggatagtcaaaaagataaatatatagagcataatccttctcgtatactctgccctttattacatcgcccgcattgggcaacgaataacaaaatgcaagcatcttgttaacgggctcgtaaattgggataaaaattatgtttttatatctattttattcaagagaatattcaggaatttctttttccggttgtatctcatcgcagtatatatcatttgtacattgtttcatattttttaatagtttacaccttttagtaggactagtatcgtacaattcatagctgtattttgaattccaatcacgcataaaaatatcttccaattgttgacgaagacctaatccatcatccggtgtaatattaatagatgctccacatgtatccgtaaagtaatttcctgtccaatttgaggtacctatataggccgttttatcggttaccatatatttggcatggtttaccctagaatacggaatgggaggatcagcatctggtacaataaatagctttacttctatatctatgtttttagattttagcatagcgatagatcttaaaaagtttctcatgataaacgaagatcgttgccagcaactaatcaatagcttaacggatacttgtctgtctatagcggctcttcttaattcatcttctatataaggccaaaacaaaattttacccgccttcgaataaataatagggataaagttcataacagatacataaacgaatttactcgcatttctaatacatgacaataaagcggttaaatcattggttctttccatagtacatagttgttgcggtgcagaagcaataaatacagagtgtggaacaccacttacgttaatactaagaggatgatctgtattataatacgacggataaaagtttttccaattatatggtagattgttaactccaagataccagtatacctcaaaaatttgagtgagatccgctgccaagttcctattattgaagatcgcaatacccaattctttgacctgagttagtgatctccaatccatgttagcgcttcctaaataaatatgtgtattatcagatatccaaaattttgtatgaagaactcctcctaggatatttgtaatatctatgtatcgtacttcaactccggccatttgtagtctttcaacatcctttaatggtttgttagatttattgacggctactctaactcttactcctcttttgggtaattgtacaatctcgtttaatattatcgtgccgaaattcgtacccacttcatccgataaactccaataaaaagatgatatatctagtgtttttgtggtattggatagaatttccctccacatgttaaatgtagacaaatatactttatcaaattgcatacctataggaatagtctctgtaatcactgcgattgtattatccggattcattttatttgttaaaaaataatcctatatcacttcactctattaaaaatccaagtttctatttctttcatgactgattttttaacttcatccgtttccttatgaagatgatgtttggcaccttcataaatttttatttctctattacaatttgcatgttgcatgaaataatatgcacctaaaacatcgctaatcttattgtttgttccctggagtatgagagtcggggggtgttaatcttggaaattatttttctaaccttgttggtagccttcaagacctgactagcaaatccagccttaattttttcatgattgattaatgggtcgtattggtatttataaactttatccatatctctagatactgattctggacatagctttccgactggcgcatttggtgtgatggttcccataagtttggcagctagcagattcagttttgaaacagcatctgcattaactagaggagacattagaatcattgctgtaaacaagtttggattatcgtaagaggctagtatagaaattgttgctcccatggaatgacccaataagtagatttaatagttaccacgtgctgtaccaaagtcatcaatcatcattttttcaccattacttcttccatgtccaatatgatcatgtgagaatactaaaattcctaacgatgatatgttttcagctagttcgtcataacgtccagaatgtttaccagctccatgacttatgaatactaatgccttaggatatgtaataggtttccaatatttacaatatatgtaatcattgtccagattgaacatacagtttgcactcatgattcacgttatataactatcaatattaacagttcgtttgatgatcatattatttttatgttttattgataattgtaaaaacatacaattaaatcaatatagaggaaggagacggatactgtcttttgtgagatagtcatggcgactaaatcagattatgaggatgctgttttttactttgtggatgatgataaaatatgtagtcgcgactccatcatcgatctaatagatgaatatatcacgtggagaaatcatgttatagtgtttaacaaagatattaccagttgtggaagactgtacaaggaattgatgaagttcgatgatgccgctatacagtactatggtattgataaaattaatgagattgtcgaagctatgagcgaaggagaccactacatcaattttacaaaagtccatgatcaggaaagtctattcgctaccataggaatatgtgctaaaatcactgaacattggggatacaaaaagatttcagaatctagattccaatcattgggaaacattacagatctgatgaccgacgataatataaacatcttgatactttttctagaaaaaaaattgaattgatgatatagtggggtcttcataacgcataattattacgttagcattctatatcaagtgttaaaaaaaattatcctatcatgtatttgagagtcttatatgtagcaaacatgataactgcaatacccataagctttagatattcacgcgtgctagagttagtggtggcattatctcgcggtgtggaaatgtccgttatataatctacaaaacaatcatcgcatatagtatgcgatagtagagtaaacatttttatcgtttctactgggttcatacatcgtctacccaattcggttatgaatgaaattgtcgccaatcttacacccaaacccttgttatccattagcatagtattaacttcgttatttatgtcataaactgtaaatgattctgtagatgccatatcatgtatgatattcatgtccctattataatcattactaactttatcacaatatatgttgataatatctatatatgatctagtctttgtgggcaactgtctatacaagtcgtctaaacgttgtttactcatatagtatcgaacagccatcattacatggtcccgttccgttgatagataatcgagtatgttagtggacttgtcaaatctatataccatattttctggaagtggatatacatagtcgtgatcaacattattgctagcctcatcttctatatcctgtactataccattatctatatcatctacataatctacgatattattatacataaacatcgacaacatactattgtcaattatctaagtcctgttgatccaaacccttgatctcctctatctgtactatctagagattgtacttcttccagttctggataatatatacgttgatagattagctgggctattctatcccccgtatttacattaaacgtacattttccattattaataagaataactcctatgtttcccctataatcttcgtctattacaccgcctcctatatcaatgccttttagggacagaccagacctaggagctattctaccatagcagaacttaggcatggacatactaatatctgtcttaattaactgtcgttctccaggagggatagtataatcgtaagcgctatataaatcatatccggcggcgtaaggtgattgcctagtaggagatttagctctgttagtttccttaacaaatctaactggtgagttaatattcatgttgaacataaaactaatattttatttcaaaattatttaccatcccatatattccatgaataagtgtgatgattgtacacttctatagtatctatatacgattcacgataaaatcctcctatcaatagcagtttattatccactatgatcaattctggattatccctcggataaataggatcatctatcagagtccatgtattgctggattcacaataaaattccgcatttctaccaaccaagaataaccttctaccgaacactaacgcgcatgatttataatgaggataataagtggatggtccaaactgccactgatcatgattgggtagcaaatattctgtagttgtatcagtttcagaatgtcctcccattacgtatataacattgtttatagatgccactgctggattacatctaggtttcagaagactcggcatattaacccaagcagcatccccgtggaaccaacgctcaacagatgtgggatttggtagacctcctactacgtataatttattgttagcgggtatcccgctagcatacagtctggggctattcatcggaggaattggaatccaattgtttgatatataatttacagctatagcattgttatgtatttcattgttcatccatccaccgatgagatatactacttctccaacatgagtacttgtacacatatggaatatatctataatttgatccatgttcataggatactctatgaatggatacttgtatgatttgcgtggttgtttatcacaatgaaatattttggtacagtctagtatccattttacattatttatacctctgggagaaagataatttgacctgattacatttttgataaggagtagcagatttcctaatttatttcttcgctttatataccacttaatgacaaaatcaactacataatcctcatctggaacatttagttcatcgctttctagaataagtttcatagatagataatcaaaattgtctatgatgtcatcttccagttccaaaaagtgtttggcaataaagtttttagtatgacataagagattggatagtccgtattctatacccatcatgtaacactcgacacaatattcctttctaaaatctcgtaagataaagtttatacaagtgtagatgataaattctacagaggttaatatagaagcacgtaataaattgacgacgttatgactatctatatatacctttccagtatatgagtaaataactatagaagttaaactgtgaatgtcaaggtctagacaaacccttgtaactggatctttatttttcgtgtatttttgacgtaaatgtgtgcgaaagtaaggagataactttttcaatatcgtagaattgactattatattgccacctatagcatcaataattgttttgaatttcttagtcatagacaatgctaatatattcttacagtacacagtattaacaaatatcggcatttatgtttctttaaaagtcaacatctagagaaaaatgattatctttttgagacataactcccattttttggtattcacccacacgtttttcgaaaaaattagtttttccttccaatgatatattttccatgaaatcaaacggattggtaacattataaatttttttaaatcccaattcagaaatcaatctatccgcgacgaattctatatatgttttcatcatttcacaattcattcctataagtttaactggaagagccgcagtaagaaattcttgttcaatggatactgcatctgttataatagatctaacggtttcttcactcggtggatacaataaatgtttaaacatcaaacatgcgaaatcgcagtgcagaccctcgtctctactaattagttcgttggaaaacgtgagtccgggcattaggccacgctttttaagccaaaatatggaagcgaatgatccggaaaagaagattccttctactgcagcaaaggcaataagtctctctccataaccggcgctgtcatgtatccacttttgagcccaatcggccttcttttttacacaaggcattgtttctatggcattaaagagatagtttttttcattactatctttaacataagtatcgatcaaaagactatacatttccgaatgaatgttttcaatggccatctgaaatccgtagaaacatctagcctcggtaatctgtacttctgtacaaaatcgttccgccaaattttcattcactattccgtcactggctgcaaaaaacgccaatacatgttttataaaatatttttcgtctggtgttagtttattccaatcattgatatctttagatatatctacttcttccactgtccaaaatgatgcctctgcctttttatacatgttccagatgtcatgatattggattgggaaaataacaaatctatttggatttggtgcaaggatgggttccataactaaattaacaatatcaataaattttttttcagttatctatatgcctgtacttggattttttgtacatcgatatcgccgcaatcactacaataattacaagtattattgatagcattgttattagtactatcataattaaattatcgacattcatgggtgctgaataatcgttattatcatcattatcattttgtaattgtgacatcatactaaataaatcgtttgcgagattgttgtgggaagcgggcatggaggatgcattatcattattatttaacgccttccatttggattcacaaatatggcgcgcgttcaacattttatggaaactataattttgtgaaaacagataacaagaaaactcgtcatcgttcaaatttttaacgatagtaaaccgattaaacgtcgagctaatttctaacgctagcgactctgttggatatgggtttccagatatatatcttttcagttcccctacgtatctataatcatctgtaggaaatggaagatatttccatttatctactgttcctaatatcatatgtggtggtgtagtagaaccattaagcgcgaaagatgttattttgcatcgtattttaacttcgcaataatttctggttagataacgcactctaccagtcaagtcaatgatattagcctttacagatatattcatagtagttgtaacgatgactccatcttttagatgcgatactcctttgtatgtaccagaatcttcgtaccgcaaactcgatatatttaaacaagttaatgagatattaacgcgttttatgaatgatgatatataaccagaagttttatcctcggtggctagcgctataaccttatcattataataccaactagtgtgattaatatgtgacacgtcagtgtgggtacaaatatgtacattatcgtctacgtcgtattcgatacatccgcatacagccaacaaatataaaatgacaaatactctaacgccgttcgtacccatcttgatgcggtttaataaatgttttgatttcaatttattgtaaaaaaagattcggttttatactgttcgatattctcattgcttatattttcatctatcatctccacacagtcaaatccgtggttagcatgcacctcatcaaccggtaaaagactatcggactcttctatcattataactctagaatatttaatttggtcattattaatcaagttaattatcttatttttaacaaacgtgagtattttactcattttttataaaaacttttagaaatatacagactctatcgtgtgtctatatcttctttttatatccaatgtatttatgtctgatttttcttcatttatcatatataatggtccaaattctacacgtgcttcggattcatccagatcattaaggttcttataattgtaacatccttctcttccctcttctgcatcttccttcttattcttattcttattcttattcttagcgtcacagaatctaccacagcaggatcccatgacgagcgtcatattaaactaatccattttcaattataatatatgattagtaatgaccattaaaataaaaaatattcttcataaccggcaagaaagtgaaaagttcacattgaaactatgtcagtagtatacatcatgaaataaatgagatgagatgagatgaaatgaaatgacatgacatgaaatgatgatatatatattctctattttggtggaggattatatgatataattcgtggataatcattcttaagacacatttcttcattcgtaaatcttttcacgttaaatgagtgtccatattttgcaatttcttcatatgatggcggtgtacgtggacgaggctgctcctgttcttgttgtggtcgccgactgtcgtgtttgcgtttagatccctccattatcgcgattgcgtagatggagtactattatataccttgtaattaattttttttattaattaaacgtataaaaacgttccgtatctgtatttaagagccagatttcgtctaatagaacaaatagctacagtaaaaataactagaataatcactacacccactagaaaccacggatcgtaatacggcaatcggttttcgataataggtggaacgtatattttatttaaggacttaacaattgtctgtaaaccacaatttgcttccgcggatcctgtattaactatctgtaaaagcatatgttggccgggcggagccgaacattctccgatatccaatttctgtatatctataatattattaacctccgcatacgcattacagttcttttctagcttggataccgcactaggtacatcgtctagatctattcctatttcctcagcgatagctcttctatccttttccggaagcaatgaaatcacttcaataaatgattcaaccatgagtgtgaaactaagtcgagaattactcatgcatttgttagttattcggagcgcgcaatttttaaactgtcctataacctctcctatatgaatagcacaagtgacattagtagggatagaatgttgagctaatttttgtaaataactatctataaaaagattatacaaagttttaaactctttagtttccgccatttatccagtctgagaaaatgtctctcataataaatttttccaagaaactaattgggtgaagaatggaaacctttaatctatatttatcacagtctgttttggtacacatgatgaattcttctaatgccgtactaaattcgatatctttttcgatttctggatatgtttttaataaagtatgaacaaagaaatggaaatcgtaataccagttatgtttaactttgaaattgttttttattttcttgttaatgattccagccacttgggaaaagtcaaagtcgtttaatgccgatttaatacgttcattaaaaacaaactttttatcctttagatgaattattattggttcattggaatcaaaaagtaagatattatcgggtttaagatctgcgtgtaaaaagttgtcgcagcatggtagttcgtaaattttaatgtataacagagccatctgtaaaaagataaactttatgtattgtaccaaagatttaaatcctaatttgatagctaactcggtatctactttatctgcagaatacagtgctaggggaaaaattataatatttcctctttcgtattcgtagttagttctcttttcatgttcgaaaaagtgaaacatgcggttaaaatagtttataacattaatattactgttaataactgccggataaaagtgggatagtaatttcacgaatttgatactgtcctttctctcgttaaacgcctttaaaaaaactttagaagaatatctcaatgagagttcctgaccatccatagtttgtatcaataatagcaacatatgaagaacccgtttatacagagtatgtaaaaatgttaatttatagtttaatcccatggcccacgcacacacgattaattttttttcatctccctttagattgttgtatagaaatttgggtactgtgaactccgccgtagtttccatgggactatataattttgtggcctcgaatacaaattttactacatagttatctatcttaaaaactataccatatcctcctgtagatatgtgataaaaatcgtcgtttataggataaaatcgtttatccttttgttggaaaaaggatgaattaatgtaatcattctcttctatctttagtagtgtttccttattaaaattcttaaaataatttaacaatctaactgacggagcccaattttggtgtaaatctaattgggacattatattgttaaaatacaaacagtctcctaatataacagtatctgataatctatggggagacatccattgatattcaggggatgaatcattggcaacacccatttattgtacaaaaagccccaatttacaaacgaaagtccaggtttgatagagacaaactattaactattttgtctctgtttttaacacctccacagtttttaatttctttagtaatgaaattattcacaatatcagtatcttctttatctaccagagattttactaacttgataaccttggctgtctcattcaatagggtagtaatatttgtatgtgtgatattgatatctttttgaattgtttcttttagaagtgattctttgatggtgccagcatacgaattacaataatgcagaaactcggttaacatgcaggaattatagtaagccaattccaattgttgcctgtgttgtattagagtgtcaatatgagcaatggtgtccttgcgtttctctgatagaatgcgagcagcgattttggcgttatcatttgacgatatttctggaatgacgaatcctgtttctactaactttttggtaggacaaagtgaaacaatcaagaagatagcttctcctcctatttgtggaagaaattgaactcctctagatgatctactgacgatagtatctccttgacagatattggaccgaattacagaagtacctggaatgtaaagccctgaaaccccctcattttttaagcagattgttgccgtaaatcctgcactgtgaccaagatagagagctcctttggtgaatccatctctatgtttcagtttaaccaagaaacagtcagctggtctaaaatttccatctctatctaatacagcatccagcttgatgtcaggaattatgaccggtttaatgttatatgtaacattgagtaaatccttaagttcataatcatcactgtcatcagttatgtacgatccaaacaatgtttctaccggcatagtggatacgaagatgctatccatcagaatgtttccctgattagtattttctatatagctattcttctttaaacgattttccaaatcagtaactatgttcatttttttaggagtaggacgcctagccagtatggaagaggattttctagatcctctcttcaacatctttgatctcaatggaatgcaaaaccccatagtgaaacaaccaacgataaaaataatattgtttttcactttttataattttaccatctgactcatggattcattaatatctttataagagctactaacgtataattctttataactgaactgagatatatacaccggatctatggtttccataattgagtaaatgaatgctcggcaataactaatggcaaatgtatagaacaacgaaattatactagagttgttaaagttaatattttctatgagctgttccaataaattatttgttgtaactgcgttcaagtcataaatcatcttgatactatccagtaaaccgtttttaagttctggaatattattatcccattgtaaagcccctaattcgactatcgaatatcctgctctgatagcagtttcaatatcgacggacgtcaatactgtaataaaggtggtagtattgtcatcatcgtgataaactactggaatatggtcgttagtaggtacggtgactttacacaacgcgatatataactttccttttgtaccatttttaacgtagttgggacgtcctgcagggtattgttttgaagaaatgatatcgagaacagatttgatacgatatttgttggattcctgattattcactataatataatctagacagatagatgattcgataaatagaaaaggtatatcgttggtaggataatacatccccattccagtattctcggatactctattaatgacactagttaagaacatgtcttctattctagaaaacgaaaacatcctacatggactcattaaaacttctaacgctcctgattgtgtctcgaatgcctcgtacaaggatttcaaggatgccatagattctttgaccaacgatttagaattgcgtttagcatctgatttttttattaaatcgaatggtcggctctctggtttgctaccccaatgataacaatagtcttgtaaagataaaccgcaagaaaatttatacgcatccatccaaataaccctagcaccatcggatgatattaatgtattattatagattttccatccacaattattgggccagtatactgttagcaacggtatatcgaatagattactcatgtaacctactagaatgatagttcgtgtactagtcataatatctttaatccaatctaagaaatttaaaattagattttttacactgttaaagttaacaaaggtattacccggatacgtggatatcatatatggcattggtccattatcagtaatagctccataaactgatacggcgatggtttttatatgtgtttgatctaacgaggaagaaattcgcgcccacaattcatctctagatatgtatttaatatcaaacggtaacacatcaatttcgggacgcgtatatgtttctaaatttttaatccaaatataatgatgacctatatgccctattatcatactgtcaactatagtacacctagagaacttacgatacatctgtttcctgtaatcgttaaattttacaaatctataacatgctaaaccttttgacgacaaccattcattaatttctgatatggaatctgtattctcgataccgtattgttctaaagccagtgctatatctccctgttcgtgggaacgctttcgtataatatcgatcaacggataatctgaagtttttggagaataatatgactcatgatctatttcgtccataaacaatctagacataggaattggaggcgatgatcttaattttgtgcaatgagtcgtcaatcctataacttctaatattgtaatattcatcatcgacataacactatctatgttatcatcgtatattagtataccacggccttcttcatttcgtgccaaaataatatacagtcttaaataattacgcaatatctcaatagtttcataattgttagctgttttcatcaaggtttgtatcctgtttaacatgatggcgttctataacgtctctattttctatttttaattttttaaatttttaacgatttactgtggctagatacccaatctctctcaaatatttttttagcctcgcttacaagctgtttatctatactattaaaactgacgaatccgtgattttggtaatgggttccgtcgaaatttgccgaagtgatatgaacatattcgtcgtcgactatcaacaattttgtattattctgaatagtgaaaaccttcacagatagatcattttgaacacacaacgcgtctagacttctggcggttgccatagaatatacgtcgttcttatcccaattaccaactagaagtctgatcttaactcctctattaatggctgcttctataatggagttgtaaatgtcaggccaatagtagctattaccgtcgacacgtgtagtgggaactatggccaaatgttcaatatctatactagtcttagccgacttgagtttatcaataactacatcagtgtctagatctctagaatatcccaataggtgttctggagaatcagtaaagaacactccacctataggattcttaatatgatacgcagtgctaactggcagacaacaagccgcagagcataaattcaaccatgaattttttgcgctattaaaggctttaaaagtatcaaatcttctacgaagatctgtggccagcgggggataatcagaatatacacctaacgttttaatcgtatgtatagatcctccagtaaatgacgcgtttcctacataacatctttcatcatctgacacccaaaaacaaccgagtagtagtcccacattattttttttatctatattaacggttataaaatttatatccgggcagtgactttgtagctctcccagatttcttttccctcgttcatctagcaaaactattattttaatccctttttcagatgcctcttttagtttatcaaaaataagcgcgcccctagtcgtactcagaggattacaacaaaaagatgctatgtatatatatttcttagctagagtgataatttcgttaaaacattcaaatgttgttaaatgatcggatctaaaatccatattttctggtagtgtttctaccagcctacattttgctcccgcaggtaccggtgcaaatggccacatttagttaacataaaaacttatacatcctgttctatcaacgattctagaatatcatcggctatatcgctaaaattttcatcaaagtcgacatcacaacctaactcagtcaatatattaagaagttccatgatgtcatcttcgtttatttctatatccgtatccattgtagattgttgaccgattatcgagtttaaatcattactaatactcaatccttcagaatacaatctgtgtttcattgtaaatttataggcggtgtatttaagttggtagattttcaattatgtatcaatatagcaacagtagttcttgctcctccttgattctagcatcctcttcattattttcttctacgtacataagcatgtccaatacgttagacaacacaccgacgatggcggccgccacagacacgaatatgactagaccgatgaccatttaaaaacccctctctagctttcacttaaactgtatcgatcattcttttagcacatgtataatataaaaaaacattattctatttcgaatttaggcttccaaaaatttttcatccgtaaaccgataataatatatatagacttgttaatagtcggaataaatagattaatgcttaaactatcatcatctccacgattagagatacaatatttacattctttttgctgtttcgaaactttatcaatacacgttaatacaaacccaggaaggagatattgaaactgaggctgttgaaaatgaaacggtgaatacaataattcagataatgtaaaatcatgattccgtattctgatgatattagaactgctaatggatgtcgatggtatgtatctaggagtatctattttaacaaagcatcgatttgctaatatacaattatcattttgattaattgttattttattcatattcttaaaaggtttcatatttatcaattcttctacattaaaaatttccatttttaatttatgtagccccgcaatactcctcattacgtttcattttttgtctataatatccattttgttcatctcggtacatagattatccaattgagaagcgcatttagtagttttgtacattttaagtttattgacgaatcgtcgaaaactagttatagttaacattttattatttgataccctgatattaatacccctgccgttactattatttataactgatgtaacccacgtaacattagaattaattatcgatagtaatgcatcgacgcttccaaaattgtctattataaactcaccgataatttttttattgcatgttttcatattcattaggattatcaaatctttaatcttattacgattgtatgcgttgatattacaagacgtcattctaaaagacggaggatctccatcaaatgccagacaatcacgtacaaagtacatggaaataggttttgttctattgcgcatcatagattcatatagaacacccatagaaatactaatttgttttactctataaaatactaatgcatctatttcatcgttttgtataacgtctttccaagtgccaaattccaaatttttttcattgatagtaccaaattcttctatctctttaactatttgcatagataggtaattacagtgatgcctacatgccgttttttgaaactgaatagatgcgtctagaagcgatgctacactagtcacaatcaccactttcatatttagaatatatgtatgtaaaaatatagtagaatttcattttgtttttttctatgctataaatgaattctcattttgcatctgctcatactccgttttatatcaataccaaagaaggaagatatctggttctaaaagccgttaaagtatgcgatgttagaactgtagaatgcgaaggaagtaaagcttcctgcgtactcaaagtagataaaccctcatcgcccgcgtgtgagagaagaccttcgtccccgtccagatgcgagagaatgaataaccctggaaaacaagtcccgtttatgagaacggacatgctacaaaatatgttcgcggctaatcgcgataatgtagcttctagacttttgtcctaaaatactattatatccttttcgatattaataaatccgtgtcgtccaggttttttatctctttcagtatgtgaatagataggtattttatctctattcatcatcgaatttaagagatccgataaacattgtttgtattctccagatgtcagcatctgatacaacaatatatgtgcacataaacctctggcacttatttcatgtaccttccccttatcactaaggagaatagtatttgagaaatatgtatacatgatattatcatgaattagatatacagaatttgtaacactctcgaaatcacacgatgtgtcggcgttaagatctaatatatcactcgataacacattttcatctagatacactagacattttttaaagctaaaatagtctttagtagtgacagtaactatgcgattattttcatcgatgatacatttcatcggcatattattacgcttaccatcaaagactataccatgtgtatatctaacgtattctagcatggttgccatacgtgcattaaacttttcaggatctttggatagatcttccaatctatctatttgagaaaacatttttatcatgttcaatagttgaaacgtcggatccactatatagatattatctataaagattttaggaactacgttcatggtatcctggcgaatattaaaactatcaatgatatgattatcgttttcatcttttatcaccatatagtttctaagatatgggattttacttaatataatattatttcccgtgataaattttattagaaaggccaaatctataagaaaagtcctagaattagtctgaagaatatctatatcgccgtaccgtatatttggattaattagatatagagaatatgatccgtaacatatacaacttttattatggcgtctaagatattcttccatcaacttattaacatttttgactagggaagatacattatgacgtcccattacttttgccttgtctattactgcgacgttcatagaatttagcatatctcttgccaattcttccattgatgttacattataagaaattttagatgaaattacatttggagctttaatagtaagaactcctaatatgtccgtgtatgtggtcactaatacagattgtagttctataatcgtaaataatttacctatattatatgtttgagtctgtttagaaaagtagctaagtatacgatcttttatttctgatgcagatgtatcaacatcggaaaaaaatctttttttattcttttttactaaagatacaaatatgtctttgttaaaaacagttattttctgaatatttctagcttgtaattttaacatatgatattcgttcacactaggtactctgcctaaataggtttctataatctttaatgtaatattaggaagagtattctgatcaggattcctattcattttgaggatttaaaactctgattattgtctaatatggtctcaacacaaactttttcacagagcgatagagtttttgataactcgtttttcttaagaaatataaaactactgtttccagagctcgctctatcttttattttatctaattcgatacaaactcctgatactggttcagaaagtaattcattaattttcagtcctttatagaagatatttaatatagataatacaaaattttcagttcttgatatcgatctgattgatcctagaactagatatattaataacgtgctcattaggcagtttatggcagcttgataattagatatagtatattccagttcatatttattagataccgcattgcccagattttgatattctatgaattcctctgaaaataaatccaaaataactagacattctattttttgtggattagtgtactctcttccctctatcatgttcactactggtgtccacgatgataaatatctagagggaatataatatagtccataggatgccaatctagcaatgtcgaataactgtaatttgattcttcgttcttcattatgaattgattcttgaggtataaacctaacacaaattatattattagacttttcgtatgtaatgtctttcatgttataagtttttaatcctggaatagaatctattttaatgaggcttttaaacgcagagttctccaacgagtcaaagcataatactctgttgtttttcttatatacgatgttacgattttcttctttgaatggaataggtttttgaattagtttataattacaacataatagataaggaagtgtgcaaatagtacgcggaaaaaacataatagctcccctgttttcatccatggttttaagtaaatgatcactggcttctttagtcaatggatattcgaacattaaccgtttcatcatcattggacagaatccatatttcttaatgtaaagagtgatcaaatcattgtgtttattgtaccatcttgttgtaaatgtgtattcggttatcggatctgctcctttttctattaaagtatcgatgtcgatctcgtctaagaattcaactatatcgacatatttcatttgtatacacataaccattactaacgtagaatgtataggaagagatgtaacgggaacagggtttgttgattcgcaaactattctaatacataattcttctgttaatacgtcttgcacgtaatctattatagatgccaagatatctatataattattttgtaagatgatgttaactatgtgatctatataagtagtgtaataattcatgtatttcgatatatgttccaactctgtctttgtgatgtctagtttcgtaatatctatagcatcctcaaaaaatatattcgcatatattcccaagtcttcagttctatcttctaaaaaatcttcaacgtatggaatataataatctattttacctcttctgatatcattaatgatatagtttttgacactatcttctgtcaattgattcttattcactatatctaagaaacggatagcgtccctaggacgaactactgccattaatatctctattatagcttctggacataattcatctattataccagaattaatgggaactattccgtatctatctaacatagttttaagaaagtcagaatctaagacctgatgttcatatattggttcatacatgaaatgatctctattgatgatagtgactatttcattctctgaaaattggtaactcattctatatatgctttccttgttgatgaaggatagaatatactcaatagaatttgtaccaacaaactgttctcttatgaatcgtatatcatcatctgaaataatcatgtaaggcatacatttaacaattagagacttgtctcctgttatcaatatactattcttgtgataatttatgtgtgaggcaaatttgtccacgttctttaattttgttatagtagatatcaaatccaatggagctacagttcttggcttaaacagatatagtttttctggaacgaattctacaacattattataaaggactttgggtagataagtgggatgaaatcctattttaattaatgcgatagccttgtcctcgtgcagatatccaaacgcttttgtgatagtatggcattcattgtctagaaacgctctacgaatatctgtgacagatatcatctttagagaatatactagtcgcgttaatagtactacaatttgtattttttaatctatctcaataaaaaaattaatatgtatgattcaatgtataactaaactactaactgttattgataactagaatcagaatctaatgatgacgtaaccaagaagtttatctactgccaatttagctgcattatttttagcatctcgtttagattttccatctgccttatcgaatactcttccgtcgatgtctacacaggcataaaatgtaggagagttactaggccccactgattcaatacgaaaagaccaatctctcctagtaatttggcagtactcattaataacggtgacagggttagcacctttccaatcaataatttttttagccggaataacatcatcaaaagacttatgatcctctctcattgatttttcgcgggatacatcatctattatggcgtcagccataacatcagcatccggcttatccgcctccgttgtcataaaccaacgaggaggaatatcgtcggagctgtacaccatagcactacgttgaagatcgtacagagctttattaacttctcgcttctccatattaagttgtctagttagttgtgcagcagtagctccttcgattccaatggttttaatagcctcacacacaatctctgcgttagaacgttcgtcgatatagattttagacatttttagagagaactaacacaaccagcaataaaactgaacctactttatcatttttttattcatcatcctctggtggttcgtcgttcctatcgaatgtggatctgattaacccgtcatctataggtgatgctggttctggagattctggaggagatggattattatctggaagaatctctgttatttccttgttttcatgtatcgattgcgttgtaacattaagattgcgaaatgctctaaatttgggaggcttaaagtgttgtttgcaatctctacacgcatgtctaactagtggaggttcgtcagcggctctagtttgaatcatcatcggcgtagtattcctacttttacagttaggacacggtgtattgtatttctcgtcgagaacgttaaaataatcgttgtaactcacatcctttattttatctatattgtattctactcctttcttaatgcattttataccgaataagagatagcgaaggaattctttttcggtgccgctagtacccttaatcatatcacatagtgttttatattccaaatttgtggcaatagacggtttatttctatacgatagtttgtttctggaatcctttgagtattctataccaatattattctttgattcgaatttagtttcttcgatattagattttgtattacctatattcttgatgtagtactttgatgatttttccatggcccattctattaagtcttccaagttggcatcatccacatattgtgatagtaattctcggatatcagtagcggctaccgccattgatgtttgttcattggatgagtaactactaatgtatacattttccatttataacacttatgtattaactttgttcatttatattttttcattattatgttgatattaacaaaagtgaatatatatatgttaataattgtattgtggttatacggctacaattttataatgagtgaaagtcagtgtccgatgatcaatgacgatagctttactctgaaaagaaagtatcaaatcgatagtgcggagtcaacaataaaaatggataagaagaggataaagtttcagaatagagccaaaatggtaaaagaaataaatcagacaataagagcagcacaaactcattacgagacattgaaactaggatacataaaatttaagagaatgattaggactactactctagaagatatagcaccatctattccaaataatcagaaaacttataaactattctcggacatttcagccatcggcaaagcatcacagaatccgagtaagatggtatatgctctgctgctttacatgtttcccaatttgtttggagatgatcatagattcattcgttatagaatgcatccaatgagtaaaatcaaacacaagatcttctctcctttcaaacttaatcttattagaatattagtggaagaaagattctataataatgaatgcagatctaataaatggagaataattggaacacaagttgataaaatgttgatagctgaatctgataaatatacaatagatgcaaggtataacctaaaacccatgtatagaatcaagggaaaatctgaagaagataccctcttcatcaaacagatggtagaacaatgtgtgacatcccaggaattggtggaaaaagtgttgaagatactgtttagagatttgttcaagagtggagaatacaaagcatacagatacgatgatgatgtagaaaatggatttattggattggatacactaaaattaaacattgttcatgatatagttgaaccatgtatgcctgttcgtaggccagtggctaagatactgtgtaaagaaatggtaaataaatactttgagaatccgctacatattattggtaagaatcttcaagagtgcattgactttgttagtgaataggcatttcatctttctccaatactaattcaaattgttaaattaataatggatagtataaatagttattagtgataaaatagtaaaaataattattagaataagagtgtagtatcatagataactctcttctataaaaatggattttattcgtagaaagtatcttatatacacagtagaaaataatatagattttttaaaggatgatacattaagtaaagtaaacaattttaccctcaatcatgtactagctctcaagtatctagttagcaattttcctcaacacgttattactaaggatgtattagctaataccaatttttttgttttcatacatatggtacgatgttgtaaagtgtacgaagcggttttacgacacgcatttgatgcacccacgttgtacgttaaagcattgactaagaattatttatcgtttagtaacgcaatacaatcgtacaaggaaaccgtgcataaactaacacaagatgaaaaatttttagaggttgccgaatacatggacgaattaggagaacttataggcgtaaattatgacttagttcttaatccattatttcacggaggggaacccatcaaagatatggaaatcatttttttaaaactgtttaagaaaacagacttcaaagttgttaaaaaattaagtgttataagattacttatttgggcatacctaagcaagaaagatacaggcatagagtttgcggataatgatagacaagatatatacactctatttcaacaaactggtagaatagtccatagcaatctaacagaaacgtttagagattatatctttcccggagataagactagctattgggtgtggttaaacgaaagtatagctaatgatgcggatatcgttcttaatagacccgcaattaccatgtatgataaaattcttagttatatatactctgagataaaacagggacgcgttaataaaaacatgcttaagttagtttatatctttgagcctgaaaaagatatcagagaacttctgctagaaatcatatatgatattcctggagatatcctatctattattgatgcaaaaaacgacgattggaaaaaatattttattagtttttataaagctaattttattaacggtaatacatttattagtgatagaacgtttaacgaggacttattcagagttgttgttcaaatagatcccgaatatttcgataatgaacgaattatgtctttattctctacgagtgctgcggacattaaacgatttgatgagttagatattaataacagttatatatctaatataatttatgaggtgaacgatatcacattagatacaatggatgatatgaagaagtgtcaaatctttaacgaggatacgtcgtattatgttaaggaatacaatacatacctgtttttgcacgagtcggatcccatggtcatagagaacggaatactaaagaaactgtcatctataaaatccaagagtagacggctgaacttgtttagcaaaaacattttaaaatattatttagacggacaattggctcgtctaggtcttgtgttagatgattataaaggagacttgttagttaaaatgataaaccatctcaagtctgtggaggatgtatccgcattcgttcgattttctacagataaaaaccctagtattcttccatcgctaatcaaaactattttagctagttataatatttccatcatcgtcttatttcaaaggtttttgagagataatctatatcatgtagaagaattcttggataaaagcatccatctaaccaagacggataagaaatatatacttcaattgataagacacggtagatcatagaacagaccaaatatattattaataatttggtatatacatagatattaattatcacatattaaaaattcacacatttttgataaatgggaactgctgcaacaattcagactcccaccaaattaatgaataaagaaaatgcagaaatgattttggaaaaaattgttgatcatatagttatgtatattagtgacgaatcaatatattcagaaaataatcctgaatatattgattttcgtaacagatacggagactatagatctctcattataaaaagtgatcacgagtttgtaaagctatgtaaagatcatgcagagaaaagttctccagaaacgcaacaaatgattatcaaacacatatacgaacaatatcttattccagtatctgaagtactattaaaacctataatgtccatgggtgacataattacatataacggatgtaaagacaatgaatggatgctagaacaactctctaccctaaactttaacaatctccgcacatggaactcatgtagcataggcaatgtaacgcgtctgttttatacattttttagttatctgatgaaagataaactaaatatataagtataatcccattctaatactttaacctgatgtattagcatcttattagaatattaacctaactaaaagacataacataaaaactcattacatagttgataaaaagcggtaggatataaatattatggctgccaccgttccgcgttttgacgacgtgtacaaaaatgcacaaagaagaattctagatcaagaaacattttttagtagaggtctaagtagaccgttaatgaaaaacacatatctatttgataattacgcgtatggatggataccagaaactgcaatttggagtagtagatacgcaaacctagatgctagtgactattatcccatttcgttgggattacttaaaaagtttgagtttctcatgtctctatataaaggtcctattccagtatacgaagaaaaagtaaatactgaattcatagccaatggatcgttctctggtagatacgtatcatatcttcgaaagttttctgctcttccaacaaacgagtttattagttttttgttactgacttccattccaatctataatatcttgttctggtttaaaaatactcagtttgatattactaaacacacattattcagatacgtctatacagataatgccaaacacctggcgttggctaggtatatgcatcaaacaggagactataagcctttgtttagtcgtctcaaagagaattatatatttaccggtcccgttccaataggtatcaaagatatagatcaccctaatcttagtagagcaagaagtccatccgattatgagacattagctaatattagtactatattgtactttaccaagtatgatccggtattaatgtttttattgttttacgtacctgggtattcaattactacaaaaattactccagcagtagagtatctaatggataaactgaaactaacaaagagcgatgtacaactgttgtgaatattttatgcttcgtaaaatgtaggttttgaaccaaacattctttcaaagaatgagatgcataaaactttattatccaatagattgactatttcggacgtcaatcgtttaaagtaaacttcgtaaaatattctttgatcactgccgagtttaaaacttctatcgataattgtctcatatgttttaatatttacaagttttttggtccatggtacattagccggacaaatatatgcaaaataatatcgttctccaagttctatagtttctggattatttttattatattcagtaaccaaatacatattagggttatctgcggatttataatttgagtgatgcattcgactcaacataaataattctagaggagacgatctactatcaaattcggatcgtaaatctgtttctaaagaacggagaatatctatacatacctgattagaattcatccgtccttcagacaacatctcagacagtctggttttgtacatcttaatcatattcttatgaaacttggaaacatctcttctagtttcactagtacctttattaattctctcaggtacagattttgaattcgacgatgccgagtatttcatcgttgtatatttcttcttcgattgcataatcagattcttatataccgcctcaaactctattttaaaattattaaacaatactctattattaatcagtcgttctaactctttcgctatttctatagacttatcgacatcttgactgtctatctctgtaaacacggagtcggtatctccatacacgctacgaaaacgaaatctgtaatctataggcaacgatgttttcacaatcggattaatatctctatcgtccatataaaatggattacttaatggattggcaaaccgtaacataccgttagataactctgctccatttagtaccgattctagatacaagatcattctacgtcctatggatgtgcaactcttagccgaagcgtatgagtatagagcactatttctaaatcccatcagaccatatactgagttggctactatcttgtacgtatattgcatggaatcataaatggccttttcagttgaactggtagcctgttttagcatctttttatatctggctctctctgccaaaaatgttcttaatagtctaggaatggttccttctattgatctatcgaaaattgctatttcagagatgaggttcggtagtctaggttcacaatgaaccgtaatatatctaggaggtggatatttctgaagcaatagctgattatttatttcttcttccaatctattggtactaacaacgacaccgactaatgtttccggagatagatttccaaagatacacacattaggatacagactgttataatcaaagattaatacattattactaaacattttttgttttggagcaaataccttaccgccttcataaggaaacttttgttttgtttctgatctaactaagatagttttagtttccaacaatagctttaacagtggacccttgatgactgtactcgctctatattcgaataccatggattgaggaagcacatatgttgacgcacccgcgtctgtttttgtttctactccataatactcccacaaatactgacacaaacaagcatcatgaatacagtatctagccatatctaaagctatgtttagattataatccttatacatctgagctaaatcaacgtcatcctttccgaaagataatttatatgtatcattaggtaaagtaggacataatagtacgactttaaatccattttcccaaatatctttacgaattactttacatataatatcctcatcaacagtcacataattacctgtggttaaaacctttgcaaatgcagcggctttgcctttcgcgtccgtagtatcgtcaccgatgaacgtcatttctctaactcctctatttaatactttacccatgcaactgaacgcgttcttggatatagaatccaatttgtacgaatccaatttttcagatttttgaatgaatgaatatagatcgaaaaatatagttccattattgttattaacgtgaaacgtagtattggccatgccgcctactcccttatgactagactgatttctctcataaatacagagatgtacagcttcctttttgtccggagatctaaagataatcttctctcctgttaataactctagacgattagtaatatatctcagatcaaagttatgtccgttaaaggtaacgacgtagtcgaacgttagttccaacaattgtttagctattcgtaacaaaactatttcagaacatagaactagttctcgttcgtaatccatttccattagtgactgtatcctcaaacatcctctatcgacggcttcttgtatttcctgttccgttaacatctcttcattaatgagcgtaaacaataatcgtttaccacttaaatcgatataacagtaacttgtatgcgagattgggttaataaatacagaaggaaacttcttatcgaagtgacactctatatctagaaataagtacgatcttgggatatcgaatctaggtatttttttagcgaaacagttacgtggatcgtcacaatgataacatccattgttaatctttgtcaaatattgctcgtccaacgagtaacatccgtctggagatatcccgttagaaatataaaaccaactaatattgagaaattcatccatggtggcattttgtatgctgcgtttctttggctcttctatcaaccacatatctgcgacggagcattttctatctttaatatctagattataacttattgtctcgtcaatgtctatagttctcatctttcccaacggcctcgcattaaatggaggaggagacaatgactgatatatttcgtccgtcactacgtaataaaagtaatgaggaaatcgtataaatacggtctcaccatttcgacatctggatttcagatataaaaatctgttttcaccgtgactttcaaaccaattaatgcaccgaacatccatttatagaatttagaaatatattttcatttaaatgaatcccaaacattggggaagagccgtatggaccattatttttatagtactttcgcaagcgggtttagacggcaacatagaagcgtgtaaacgaaaactatatactatagttagcactcttccatgtcctgcatgtagacggcacgcgactattgctatagaggacaataatgtcatgtctagcgatgatctgaattatatttattattttttcatcagattatttaacaatttggcatctgatcccaaatacgcaattaatgtgtcaaaggttaaacctttataaacttaacccattataaaacttatgattagtcacgactgaaataaccgcgtgattattttttggtataattctacacggcatggtttctgtaactatgaattcaacccccgttacattagtgaaatctttaacaaacagcaagggttcgtcaaagacataaaactcattgtttacaatcgaaatagaccccctatcacacttaaaataaaaaatatccttatcctttaccaccaaataaaattctgattggtcaatgtgaatgtattcacttaacagttccacaaatttatttattaactccgaggcacatacatcgtcggtattttttatggcaaactttactcttccagcatccgtttctaaaaaaatattaacgagttccatttatatcatccaatattattgaaataacgttgatggacaaataatacaaataagaaggtacggtacctttgtccaccatctcctccaattcatgctctattttgtcattaactttaatgtatgaaaacagtacgccacatgcttccatgacagtgtgtaacactttggatacaaaatgtttgacattagtataattgtttaagactgtcaatctataatagatagtagctataatatattctatgatggtattgaagaagatgacaaccttggcatattgatcatttaacacagacatggtatcaacagatagcttgaatgaaagagaatcagtaattggaataagcgtcttctcgatagagtgtccgtataccaacatgtctgatattttgatgtattccattaaattatttagttttttctttttattttcgttaaacagcatttctgtcaacggaccccaacatcgttgaccgattaagttttgattgatttttccgtgtaaggcgtatctagtcagatcgtatagcctatccaataatccatcatctgtgcgtagatcacatcgtacactttttaattctctatagaagagcgacagacatctggagcaattacagacagcaatttctttattctctacagatgtaagatacttgaagacattcctatgatgatgcagaattttggataacacggtattgatggtatctgttaccataattcctttgatggctgatagtgtcagagcacaagatttccaatctttgacaatttttagcaccattatctttgttttgatatctatatcagacagcatggtgcgtctgacaacacagggattaagacggaaagatgaaatgattctctcaacatcttcaatagataccttgctattttttctggcattatctatatgtgcgagaatatcctctagagaatcagtatcctttttgatgatagtggatctcaatgacatgggacgtctaaaccttcttattctatcaccagattgcatggtgatttgtcttctttcttttatcataatgtaatctctaaattcatcggcaaattgtctatatctaaaatcataatatgagatgtttacctctacaaatatctgttcgtccaatgttagagtatctacatcagttttgtattccaaattaaacatggcaacggatttaattttatattcctctattaagtcctcgtcgataataacagaatgtagataatcatttaatccatcgtacatggttggaagatgctcgttgacaaaatctttaattgtcttgatgaaggtgggactatatctaacatcttgattaataaaatttataacattgtccataggatactttgtaactagttttatacacatctcttcatcggtaagtttagacagaatatcgtgaacaggtggtatattatattcatcagatatacgaagaacaatgtccaaatctatattgtttaatatattatatagatgtagtgtagctcctacaggaatatctttaactaagtcaatgatttcatcaaccgttagatctattttaaagttaatcatataggcattgatttttaaaaggtatgtagccttgactacattctcattaattaaccattccaagtcactgtgtgtaagaagattatattctatcataagcttgactacatttggtcccgataccattaaagaattcttatgatataaggaaacagcttttaggtactcatctactctacaagaattttggagagccttaacgatatcagtgacgtttattatttcaggaggaaaaaacctaacattgagaatgtcggagttaatagcttccagatacagtgattttggcaatagtccgtgtaatccataatccagtaacacgagctggtgcttgctagacaccttttcaatgtttaatttttttgaaataagctttgataaagccttcctcgcaaattccggatacatgaacatgtcggcgacatgattaagtattgttttttcattatttttatattttctcaacaagttctcaataccccaatagatgatagaatatcacccaatgcgtccatgttgtctatttccaacaggtcgctatatccaccaatagaagttttcccaaaaaagattctaggaacagttctaccaccagtaatttgttcaaaatagtcacgcaattcattttcgggtttaaattctttaatatcgacaatttcatacgctcctcttttgaaactaaacttatttagaatatccagtgcatttctacaaaaaggacatgtatacttgacaaaaattgtcactttgttattggccaacctttgttgtacaaattcctcggccattttaatatttaagtgatataaaactatctcgacttatttaactctttagtcgagatatatggacgcagatagctatatgatagccaactacagaaggcaaacgctataaaaaacataattacgacgagcatatttataaatatttttattcagcattacttgatatagtaatattaggcacagtcaaacattcaaccactctcgatacattaactctctcattttctttaacaaattctgcaatatcttcgtaaaaagattcttgaaactttttagaatatctatcgactctagatgaaatagcgttcgtcaacatactatgttttgtatacataaaggcgcccattttaacagtttctagtgacaaaatgctagcgatcctaggatcctttagaatcacatagattgacgattcgtctctcttagtaactctagtaaaataatcatacaatctagtacgcgaaataatattatccttgacttgaggagatctaaacaatctagttttgagaacatcgataagttcatcgggaatgacatacatactatctttaatagaactcttttcatccagttgaatggattcgtccttaaccaactgattaatgagatcttctattttatcattttccagatgatatgtatgtccattaaagttaaattgtgtagcgcttctttttagtctagcagccaatactttaacatcactaatatcgatatacaaaggagatgatttatctatggtattaagaattcgtttttcgacatctgtcaaaaccaattcctttttgcctgtatcatccagttttccatcctttgtaaagaaattattttctactagactattaataagactgataaggattcctccataattgcacaatccaaactttttcacaaaactagactttacgagatctacaggaatgcgtacttcaggttttttagcttgtgattttttcttttgcggacattttctagtaaccaactcatctaccatttcattgattttagcagtgaaataagctttcaatgcacgggcactgatactattgaaaacgagttgatcttcaaattccgccatttaagtttaccaaacaacttttaaatacaaatatatcaatagtagtagaataagaactataaaaaaaataataattaaccaataccaaccccaacaaccggtattattagttgatgtgactgttttctcatcacttagaacagatttaacaatttctataaagtctgtcaaatcatcttccggagaccccataaatacaccaaatatagcggcgtacaacttatccatttatacattgaatattggcttttctttatcgctatcttcatcatattcatcatcaatatcaacaagtcccagattacgagccagatcttcttctacattttcagtcattgatacacgttcactatctccagagagtccgataacgttagccaccacttctctatcaatgattagtttcttgagtgcgaatgtaatttttgtttccgttccggatctatagaaaactacaggtgtgataattgccttggccaattgtctttctcttttactgagtgattctagttcaccttctatagatctgagaatggatgattctccagccgaaacatattctaccatggctccgtttaatttgttgatgaagatggattcatccttaaatgttttctctgtaatagtttccaccgaaagactatgcaaagaatttggaatgtgttccttgtgcttaatgtttccatagacggattctagaagttgatacaacataggactagccgcggtaacttttatttttagaaagtatccatcgcttctatcttgtttagatttatttttataaagtttagtctctccttccaacataataaaagtggaagtcatttgactagataaactatcagtaagttttatagagatagacgaacaattagcgtattgagaagcatttagtgtaacgtattcgatacattttgcattagatttactaatcgattttgcatactctataacacccgcacaagtctgtagagaatcgctagatgcagtaggtcttggtgaagtttcaactctcttcttgattaccttactcatgattaaacctaaataattgtactttgtaatataatgatatatattttcactttatctcatttgagaataaaaatgtttttgtttaaccactgcatgatgtacagatttcggaatcgcaaaccaccagtggttttattttatccttgtccaatgtgaattgaatgggagcggatgcgggtttcgtacgtagatagtacattcccgtttttagaccgagactccatccgtaaaaatgcatactcgttagtttggaataactcggatctgctatatggatattcatagattgactttgatcgatgaaggctcccctgtctgcagccatttttatgatcgtcttttgtggaatttcccaaatagttttataaactcgcttaatatcttctggaaggtttgtattctgaatggatccaccatctgccataatcctattcttgatctcatcattccataattttctctcggttaaaactctaaggagatgcggattaactacttgaaattctccagacaatactctccgagtgtaaatattactggtatacggttccaccgactcattatttcccaaaatttgagcagttgatgcagtcggcataggtgccaccaataaactatttctaagaccgtatgttctgattttatcttttagaggttcccaattccaaagatccgacggtacaacattccaaagatcatattgtagaataccgttactggcgtacgatcctacatatgtatcgtatggtccttccttctcagctagttcacaactcgcctctaatgcaccgtaataaatggtttcgaagatcttcttatttagatcttgtgcttccaggctatcaaatggataatttaagagaataaacgcgtccgctaatccttgaacaccaataccgataggtctatgtctcttattagagatttcagcttctggaataggataataattaatatctataattttattgagatttctgacaattactttgaccacatccttcagtttgagaaaatcaaatcgcccatctattacaaacatgttcaaggcaacagatgccagattacaaacggctacctcattagcatccgcatattgtattatctcagtgcaaagattactacacttgatagttcctaaattttgttgattactctttttgttacacgcatccttataaagaatgaatggagtaccagtttcaatctgagattctataatcgctttccagacgactcgagcctttattatagatttgtatctcctttctctttcgtatagtgtatacaatcgttcgaactcgtctccccaaacattgtccaatccaggacattcatccggacacatcaacgaccactctccgtcatccttcactcgtttcataaagagatcaggaatccaaagagctataaatagatctctggttctatgttcctcgtttcctgtattctttttaagatcgaggaacgccataatatcagaatgccacggttccaagtatatggccataactccaggccgtttgtttcctccctgatctatgtatctagcggtgttattataaactctcaacattggaataataccgtttgatataccattggtaccggagatatagcttccactggcacgaatattactaattgatagacctattccccctgccattttagagattaatgcgcatcgttttaacgtgtcatagataccctctatgctatcatcgatcatgttaagtagaaaacagctagacatttggtgacgactagttcccgcattaaataaggtaggagaagcgtgcgtaaaccatttttcagaaagtagattgtacgtctcgatagctgagtctatatcccattgatgaattcctactgcgacacgcattaacatgtgctgaggtctttcaacgatcttgttgtttattttcaacaagtaggatttttccaaagttttaaaaccaaaatagttgtatgaaaagtctcgttcgtaaataataaccgagttgagtttatccttatatttgttaactatatccatggtgatacttgaaataatcggagaatgtttcccatttttaggattaacatagttgaataaatcctccatcacttcactaaatagtttttttgtttccttgtgtagatttgatacggctattctggcggctagaatggcataatccggatgttgtgtagtacaagtggctgctatttcggctgccagagtgtccaattctaccgttgttactccattatatattccttgaataaccttcatagctattttaataggatctatatgatccgtgtttaagccataacataattttctaatacgagacgtgattttatcaaacatgacattttccttgtatccatttcgtttaatgacaaacatttttgttggtgtaataaaaaaattatttaacttttcattaatagggatttgacgtacgtagcgtacaaaatgatcgttcctggtatatagataaagagtcctatatatttgaaaatcgttacggctcgattaaactttaatgattgcatagtgaatatatcattaggatttaactccttgactatcatggcggcgccagaaattaccatcaaaagcattaatacagttatgccgatcgcagttagaacggttatagcatccaccatttatatctaaaaattagatcaaagaatatgtgacaaagtcctagttgtatactgagaattgacgaaacaatgtttcttacatatttttttcttattagtaactgacttaatagtaggaactggaaagctagacttgattattctataagtatagatacccttccaaataatattctctttgataaaagttccagaaaatgtagaattttttaaaaagttatcttttgctattaccaagattgtgtttagacgcttattattaatatgagtaatgaaatccacaccgcctctagatatcgcttttatttccacattagatggtaaatccaatagtgaaactatctttttaggaatgtatggactcgcgtttagaggagtgaacgtcttgggcgtcggaaaggatgattcgtcaaacgaataaacaatttcacaaatggatgttaatgtattagtaggaaatttcttgacgctagtggaattgaagattctaatggatgatgttctacctatttcatccgataacatgttaatttccgacaccaacggttttaatatttcgatgatatacggtagtctctctttcggacttatatagcttattccacaatacgagtcattatatactccaaaaaacaaaataactagtataaaatctgtatcgaatgggaaaaacgaaattatcgacataggtatagaatctggaacattgaacgtattaatacttaattctttttctgtggtaagtaccgataggttattgacattgtatggttttaaatattctataacttgagacttgatagatattagtgatgaattgaaaattatttttatcaccacgtgtgtttcaggatcatcgtcgacgcccgtcaaccaaccgaatggagtaaaataaatatcattaatatatgctctagatattagtatttttatcaatcctttgattatcatcttctcgtaggcgaatgattccatgatcaagagtgatttaagaacatcctccggagtattaatgggcttagtaaacagtccatcgttgcaataataaaagttatccaagttaaaggatattatgcattcgtttaaagatatcacctcatctgacggagacaattttttggtaggttttagagactttgaagctacttgtttaacaaagttattcatcgtcgtttactattctatttaattttgtagttaatttatcacatatcacattaattgactttttggtccatttttccatacgtttatattcttttaatcctgcgttatccgtttccgttatatccagggatagatcttgcaagttaaatagaatgctcttaaataatgtcatttttttatccgctaaaaatttaaagaatgtataaacttttttcaaagatttaaaacttttaggtggagttctagtacacaatatcataaacaaactaataaacatcccgcattcagattccaacagctgattaacttccacattaatacagcctattttcgctccaaatgtacattcgaaaaatctgaataaaacatcgatgtcacaatttgtattatccaatacagaatgtttgtgattcgtgttaaaaccatcggagaaggaataaaaataaaaattattatagtggtggaattcagttggaatattgcctccggagtcataaaaggatactaaacattgttttttatcataaattacacatttccaatgagacaaataacaaaatccaaacattacaaatctagaggtagaacttttaattttgtctttaagtatatacgataagatatgtttattcataaacgcgtcaaatttttcatgaatcgctaaggagtttaagaatctcatgtcaaattgtcctatataatccacttcggatccataagcaaactgagagactaagttcttaatacttcgattgctcatccaggctcctctctcaggctctattttcatcttgacgacctttggattttcaccagtatgtattcctttacgtgataaatcatcgattttcaaatccatttgtgagaagtctatcgccttagatactttttcccgtagtcgaggtttaaagaaatacgctaacggtatactagtaggtaactcaaagacatcatatatagaatggtaacgcgtctttaactcgtcggttaactctttcttttgatcgagttcgtcgctactattgggtctgctcaggtgccccgactctactagttccaacatcataccgataggaatacaagacactttgccggcggttgtagatttatcatatttttccactacatatccgttacaatttgttaaaaatttagatacatctatattgctacataatccagctagtgaatatatatgacataataaattggtaaatcctagttctggtattttactaattactaaatctgtatatctttccatttatcatggaaaagaatttaccagatatcttcttttttccaaactgcgttaatgtattctcttacaaatattcacaagatgaattcagtaatatgagtaaaacggaacgtgatagtttctcattggcggtgtttccagttataaaacatagatggcataacgcacacgttgtaaaacataaaggaatatacaaagttagtacagaagcacgtggaaaaaaagtatctcctccatcactaggaaaacccgcacacataaacctaaccgcgaagcaatatatatacagtgaacacacaataagctttgaatgttatagttttctaaaatgtataacaaatacagaaatcaattcgttcgatgagtatatattaagaggactattagaagctggtaatagtttacagatattttccaattccgtaggtaaacgaacagatactataggtgtactagggaataagtatccatttagcaaaattccattggcctcattaactcctaaagcacaacgagagatattttcagcgtggatttctcatagacctgtagttttaactggaggaactggagtgggtaagacgtcacaggtacccaagttattgctttggtttaattatttatttggtggattctctactctagataaaatcactgactttcacgaaagaccagtcattctatctcttcctaggatagctttagttagattgcatagcaataccattttaaaatcattgggatttaaggtactagatggatctcctatttctttacggtacggatctataccggaagaattaataaacaaacaaccaaaaaaatatggaattgtattttctacccataagttatctctaacaaaactatttagttatggcactcttattatagacgaagttcatgagcatgatcaaataggagatattattatagcagtagcgagaaagcatcatacgaaaatagattctatgtttttaatgactgccacgttagaggatgacagggaacggctaaaagtatttttacctaatcccgcatttatacatattcctggagatacactgtttaaaattagcgaggtatttattcataataagataaatccatcttccagaatggcatacatagaagaagaaaagagaaatttagttactgctatacagatgtatactcctcctgatggatcatccggtatagtctttgtggcatccgttgcacagtgtcacgaatataaatcatatttagaaaaaagattaccgtatgatatgtatattattcatggtaaggtcttagatatagacgaaatattagaaaaagtgtattcatcacctaatgtatcgataattatttctactccttatttggaatccagcgttactatacacaatgttacacacatttatgatatgggtagagtttttgtccccgctccttttggaggatcgcaagaatttatttctaaatctatgagagatcaacgaaaaggaagagtaggaagagttaatcctgggacatacgtctatttctatgatctgtcttatatgaagtctatacagcgaatagattcagaatttctacataattatatattgtacgctaataagtttaatctaacactccccgaagatttgtttataatccctacaaatttggatattctatggcgtacaaaggaatatatagactcgttcgatattagtacagaaacatggaataaattattatccaattattatatgaagatgatagagtatgctaaactttatgtactaagtcctattctcgctgaggagttggataattttgagaggacgggagaattaactagtattgtacaagaagccattttatctctaaatttacgaattaagattttaaattttaaacataaagatgatgatacgtatatacacttttgtaaaatattattcggtgtctataacggaacaaacgctactatatattatcatagacctctaacgggatatatgaatatgatttcagatactatatttgttcctgtagataataactaaaaattaaactctaatgaccacatctttttttagagatgaaaaattttctacatctccttttgtagacacgactaaacattttgcagaaaaaagtttattattgtttagataatcgtatacttcatcagtgtagatagtaaatgtgaacagataaaaggtattcttgctcaatagattggtaaattccatagaatatattaatcctttcttcttgagatcccacatcatttcaaccagagacgttttatccaatgatttacctcgtactataccacatacaaaactagattttgcagtgacgtcgtacctggtattcctaccaaacaaaattttacttttagttcttttagaaaattctaaggtagaatctctatttgccaatatgtcatctatggaattaccactagcaaaaaatgatagaaatatatattgatacatcgcagctggttttgatctactatactttaaaaacgaatcagattccataattgcctgtatatcatcagctgaaaaactatgttttacacgtattccttcggcatttctttttaatgatatatcttgtttagacaatgataaagttatcatgtccatgagagacgcgtctccgtatcgtataaatatttcattagatgttagacgcttcattaggggtatacttctataaggtttcttaatcagtccatcattggttgcgtcaagaactactatcggatgttgttgggtatctctagtgttacacatggccttactaaagtttgggtaaataactatgatatctctattaattatagatgcatatatttcattcgtcaaggatattagtatcgacttgctatcgtcattaatacgtgtaatgtaatcatataaatcatgcgatagccaaggaaaatttaaatagatgttcatcatataatcgtcgctataattcatattaatacgttgacattgactaatttgtaatatagcctcgccacgaagaaagctctcgtattcagtttcatcgataaaggataccgttaaatataactggttgccgatagtctcatagtctattaagtggtaagtttcgtacaaatacagaatccctaaaatattatctaatgttggattaatctttaccataactgtataaaatggagacggagtcataactattttaccgtttgtacttactggaatagatgaaggaataatctccggacatgctggtaaagacccaaatgtctgtttgaagaaatccaatgttccaggtcctaatctcttaacaaaaattacgatattcgatcccgatatcctttgcattctatttaccagcatatcacgaactatattaagattatctatcatgtctattctcccaccgttatataaatcgcctccgctaagaaacgttagtatatccatacaatggaatacttcatttctaaaatagtattcgttttctaattctttaatgtgaaatcgtatactagaaagggaaaaattatctttgagttttccgttagaaaagaaccacgaaactaatgttctgattgcgtccgattccgttgctgaattaatggatttacaccaaaaactcatataacttctagatgtagaagcattcgctaaaaaattagtagaatcaaaggatataagtagatgttccaacaagtgagcaattcccaagatttcatctatatcattctcgaatccgaaattagaaattcccaagtagatatcctttttcatccgatcgttgatgaaaatacgaactttattcggtaagacaatcatttactaaggagtaaaataggaagtaatgttcgtatgtcgttatcatcgtataaattaaaggtgtgttttttaccattaagtgacattataattttaccaatattggaattataatataggtgtatttgcgcactcgcgacggttgatgcatcggtaaatatagctgtatctaatgttctagtcggtatttcatcatttcgctgtctaataatagcgttttctctatctgtttccattacagctgcctgaagtttattggtcggataatatgtaaaataataagaaatacatacgaataacaaaaataaaataagatataataaagatgccatttagagatctaattttgttcaacttgtccaaattcctacttacagaagatgaggaatcgttggagatagtgtcttccttatgtagaggatttgaaatatcttatgatgacttgataacttactttccagataggaaataccataaatatatttataaagtatttgaacatgtagatttatcggaggaattaagtatggaattccatgatacaactctgagagatttagtctatcttagattgtacaagtattccaagtgtatacggccgtgttataaattaggagataatctaaaaggcatagttgttataaaggacaggaatatttatattagggaagcaaatgatgacttgatagaatatctcctcaaggaatacactcctcagatttatacatattctaatgagcgcgtccccataactggttcaaaattaattctttgtggattttctcaagttacatttatggcgtatacaacgtcgcatataacaacaaataaaaaggtagatgttctcgtttccaaaaaatgtatagatgaactagtcgatccaataaattatcaaatacttcaaaatttatttgataaaggaagcggaacaataaacaaaatactcaggaagatattttattcggtaacaggtggccaaactccataggtagctttttctatttcggattttagaatttccaaattcaccagcgatttatcggttttggtgaaatccaaggatttattaatgtccacaaatgccatttgttttgtctgtggattgtatttgaaaatggaaacgatgtagttagatagatgcgctgcgaagtttcctattagggttccgcgcttcacgtcacccagcatacttgaatcaccatcctttaaaaaaaatgataagatatcaacatggagtatatcatactcggattttaattcttctactgcatcactgacattttcacaaatactacaatacggtttaccgaaaataatcagtacgttcttcatttatgggtatcaaaaacttaaaatcgttactgctggaaaataaatcactgacgatattagatgataatttatacaaagtatacaatggaatatttgtggatacaatgagtatttatatagccgtcgccaattgtgtcagaaacttagaagagttaactacggtattcataaaatacgtaaacggatgggtaaaaaagggagggcatgtaaccctttttatcgatagaggaagtataaaaattaaacaagacgttagagacaagagacgtaaatattctaaattaaccaaggacagaaaaatgctagaattagaaaagtgtacatccgaaatacaaaatgttaccggatttatggaagaagaaataaaggcaaaaatgcaattaaaaatcgataaacttacatttcaaatatatttatctgattctgataacataaaaatatcattgaatgagatactaacacatttcaacaataatgagaatgttacattattttattgtgatgaacgagacgcagaattcgttatgtgtctcgaggctaaaacacatttctctaccacaggagaatggccgttgataataagtaccgatcaggatactatgctatttgcatctgctgataatcatcctaagatgataaaaaacttaactcaactgtttaaatatgttccatctgcagaggataactatttagcaaaattaacggcgttagtgaatggatgtgatttctttcctggactctatggggcatctataacacccaccaacttaaacaaaatacaattgtttagtgattttacaatcgataatatagtcactagtttggcaattaaaaattattatagaaagactaactctaccgtagacgtgcgtaatattgttacgtttataaacgattacgctaatttagacgatgtctactcgtatgttcctccttgtcaatgcactgttcaagaatttatattttccgcattagatgaaaaatggaatgaatttaaatcatcttatttagaaagcgtgccgttaccctgccaattaatgtatgcattagaaccacgcaaggagattgatgtttcagaagttaaaactttatcatcttatatagatttcgaaaatactaaatcagatatcgatgttataaaatctatatcctcgatcttcggatattctaacgaaaactgtaacacgatagtattcggcatctataaggataatttactactgagtataaataattcattttactttaacgatagtctgttaataaccaatactaaaagtgataatataataaatataggttactagattaaaaatggtgttccaactcgtgtgctctacatgcggtaaagatatttctcacgaacgatataaattgattatacgaaaaaaatcattaaaggatgtactcgtcagtgtaaagaacgaatgttgtaggttaaaattatctacacaaatagaacctcaacgtaacttaacagtgcaacctctattggatataaactaatatggatccggttaattttatcaagacatatgcgcctagaggttctattatttttattaattataccatgtcattaacaagtcatttgaatccatcaatagaaaaacatgtgggtatttattatggtacgttattatcggaacacttggtagttgaatctacctatagaaaaggagttcgaatagtcccattggatagtttttttgaaggatatcttagtgcaaaagtatacatgttagagaatattcaagttatgaaaatagcagctgatacgtcattaactttattgggtattccatatggatttggtcatgatagaatgtattgttttaaattggtagctgactgttataaaaatgccggtgttgaaacatcgtctaaacgaatattaggtaaagatatttttctgagccaaaacttcacagacgataatagatggataaagatatatgattctaataatttaacattttggcaaattgattaccttaaagggtgagttaatatgcataactactcctccgttgttttttccctcgttctttttcttaacgttgtttgccatcactctcataatgtaaagatattctaaaatggtaaacttttgcatatcggacgcagaaattggtataaatgttgtaattgtattatttcccgtcaatggactagtcacagctccatcagttttatatcctttagagtatttctcactcgtgtctaacattctagagcattccatgatctgtttatcgttgatattggccggaaagatagattttttattttttattatattactattggcaattgtagatataacttctggtaaatatttttctaccttttcaatttcttctattttcaagccggctatatattctgctatattgttgctagtatcaataccttttctggctaagaagtcatatgtggtattcactatatcagttttaactggtagttccattagcctttccacttctgcagaataatcagaaattggttctttaccagaaaatccagctactataataggctcaccgatgatcattggcaaaatcctatattgtaccagattaatgagagcatatttcatttccaataattctgctagttcttgagacattgatttatttgatgaatctagttggttctctagatactctaccatttctgccgcatacaataacttgttagataaaatcagggttatcaaagtgtttagcgtggctagaatagtgggcttgcatgtattaaagaatgcggtagtatgagtaaaccgttttaacgaattatatagtctccagaaatctgtggcgttacatacatgagccgaatgacatcgaagattgtccaatatttttaatagctgctctttgtccattatttctatatttgactcgcaacaattgtagataccattaatcactgattcctttttcgatgccggacaatagcacaattgtttagctttggactctatgtattcagaattaatagatatatctcttaatacagattgcactatacattttgaaactatgtcaaaaattgtagaacgacgctgttctgcagccatttaactttaaataatttacaaaaatttaaaatgagcatccgtataaaaatcgataaactgcgccaaattgtggcatatttttcagagttcagtgaagaagtgtctataaatgtagactcgacggatgagttaatgtatatttttgccgccttgggcggatctgtaaacatttgggccattatacctctcagtgcatcagtgttctaccgcggagccgaaaatattgtgtttaatcttccggtgtccaaggtaaaatcgtgtttgtgtagttttcacaatgatgccatcatagatatagaacctgatctggaaaataatctagtaaaactttctagttatcatgtagtaagtgtcgattgtaacaaggaactgatgcctattaggacagatactactatttgtctaagtatagatcaaaagaaatcttacgtgtttaattttcacaagtatgaagaaaaatgttgtggtagaaccgtcattcatttagaatggttgttgggctttatcaagtgtattagtcagcatcagcatttggctattatgtttaaagatgacaatattattatgaagactcctggtaatactgatgcgttttccagggaatattctatgactgaatgttctcaagaactacaaaagttttctttcaaaatagctatctcgtctctcaacaaactacgaggattcaaaaagagagtcaatgtttttgaaactagaatcgtaatggataatgacgataacattctaggaatgttgttttcggatagagttcaatcctttaagatcaacatctttatggcgtttttagattaatactttcaatgagataaatatgggtggcggagtaagtgttgagctccctaaacgggatccgcctccgggagtacccactgatgagatgttattaaacgtggataaaatgcatgacgtgatagctcccgctaagcttttagaatatgtgcatataggaccactagcaaaagataaagaggataaagtaaagaaaagatatccagagtttagattagtcaacacaggacccggtggtctttcggcattgttaagacaatcgtataatggaaccgcacccaattgctgtcgcacttttaatcgtactcattattggaagaaggatggaaagatatcagataagtatgaagagggtgcagtattagaatcgtgttggccagacgttcacgacactggaaaatgcgatgttgatttattcgactggtgtcagggggatacgttcgatagaaacatatgccatcagtggatcggttcagcctttaataggagtgatagaactgtagagggtcaacaatcgttaataaatctgtataataagatgcaaacattatgtagtaaagatgctagtgtaccaatatgtgaatcatttttgcatcatttacgcgcacacaatacagaagatagcaaagagatgatcgattatattctaagacaacagtctgcggactttaaacagaaatatatgagatgtagttatcccactagagataagttagaagagtcattaaaatatgcggaacctcgagaatgttgggatccagagtgttcgaatgccaatgttaatttcttgctaacacgtaattataataatttaggactttgcaatattgtacgatgtaatactagcgtgaacaacttacagatggataaaacttcctcattaagattgtcatgtggattaagcaatagtgatagattttctactgttcccgtcaatagagcaaaagtagttcaacataatattaaacattcgttcgacctaaaattgcatttgatcagtttattatctctcttggtaatatggatactaattgtagctatttaaatgggtgccgcggcaagcatacagacgacggtgaatacactcagcgaacgtatctcgtctaaattagaacaagaagcgaacgctagtgctcaaacaaaatgtgatatagaaatcggaaatttttatatccgacaaaaccatggatgtaacctcactgttaaaaatatgtgctctgcggacgcggatgctcagttggatgctgtgttatcagccgctacagaaacatatagtggattaacaccggaacaaaaagcatacgtgccagctatgtttactgctgcgttaaacattcagacaagtgtaaacactgttgttagagattttgaaaattatgtgaaacagacttgtaattctagcgcggtcgtcgataacaaattaaagatacaaaacgtaatcatagatgaatgttacggagccccaggatctccaacaaatttggaatttattaatacaggatctagcaaaggaaattgtgccattaaggcgttgatgcaattgactactaaggccactactcaaatagcacctaaacaagttgctggtacaggagttcagttttatatgattgttatcggtgttataatattggcagcgttgtttatgtactatgccaagcgtatgctgttcacatccaccaatgataaaatcaaacttattttagccaataaggaaaacgtccattggactacttacatggacacattctttagaacttctccgatggttattgctaccacggatatgcaaaactgaaaatatattgataatattttaatagattaacatggaagttatcgctgatcgtctagacgatatagtgaaacaaaatatagcggatgaaaaatttgtagattttgttatacacggtctagagcatcaatgtcctgctatacttcgaccattaattaggttgtttattgatatactattatttgttatagtaatttatatttttacggtacgtctagtaagtagaaattatcaaatgttgttggcgttggtggcgctagtcatcacattaactattttttattactttatactataatagtactagactgacttctaacaaacatctcacctgccataaataaatgcttgatattaaagtcttctatttctaacactattccatctgtggaaaataatactctgacattatcgctaattgacacatcggtgagtgatatgcctataaagtaataatcttctttgggcacatataccagtgtaccaggttctaacaacctatttactggtgctcctgtagcatactttttctttaccttgagaatatccatcgtttgcttggtcaatagcgatatgtgattttttatcaaccactcgaaaaagtaattggagtgttcatatcctctacgggctattgtctcatggccgtgtatgaaatttaagtaacacgactgtggtagatttgttctatagagccgattgccgcaaatagatagaactaccaatatgtctgtacaaatgttaaacattaattgattaacagaaaaaacaatgttcgttctgggaatagaaaccagatcaaaacaaaattcgttagaatatatgccacgtttatacattgaatataaaataactacagtttgaaaaataacagtatcatttaaacatttaacttgcggggttaatttcacaactttactgtttttaaactgttcaaaatatagcatcgatccatgagaaatacgtttagccgcctttaatagaggaaatcctaccgcctttctggatctcaccaacgacgatagttctgaccagcaacttatttcttcatcatccacctgttttaacatataataggcaggagatagatatccgtcattgcaatattccttttcgtaggcacacaatctaatattgataaaatctccattctcttctctgcatttattatcttgtttcggtggctgattaggctgtagtcttggtttaggctttggtatatcgttgttgaatctattttggtcattaaatctttcatttcttcctggtatatttttatcacctcgtttggttggatttttgtctatattatcgtttgtaacatcggtacgggtattcatttatcacaaaaaaaacttctctaaatgagtctactgctagaaaacctcatcgaagaagataccatattttttgcaggaagtatatctgagtatgatgatttacaaatggttattgccggcgcaaaatccaaatttccaagatctatgctttctatttttaatatagtacctagaacgatgtcaaaatatgagttggagttgattcataacgaaaatatcacaggagcaatgtttaccacaatgtataatataagaaacaatttgggtctaggagatgataaactaactattgaagccattgaaaactatttcttggatcctaacaatgaagttatgcctcttattattaataatacggatatgactgccgtcattcctaaaaaaagtggtaggagaaagaataagaacatggttatcttccgtcaaggatcatcacctatcttgtgcattttcgaaactcgtaaaaagattaatatttataaagaaaatatggaatccgcgtcgactgagtatacacctatcggagacaacaaggctttgatatctaaatatgcgggaattaatgtcctgaatgtgtattctccttccacatccatgagattgaatgccatttacggattcaccaataaaaataaactagagaaacttagtactaataaggaactagaatcgtatagttctagccctcttcaagaacccattaggttaaatgattttctgggactattggaatgtgttaaaaagaatattcctctaacagatattccgacaaaggattgattactataaatggagaatgttcctaatgtatactttaatcctgtgtttatagagcccacgtttaaacattctttattaagtgtttataaacacagattaatagttttatttgaagtattcattgtattcattctaatatatgtattttttagatctgaattaaatatgttcttcatgcctaaacgaaaaatacccgatcctattgatagattacgacgtgctaatctagcgtgtgaagacgataaattaatgatctatggattaccatggatgacaactcaaacatctgcgttatcaataaatagtaaaccgatagtgtataaagattgtgcaaagcttttgcgatcaataaatggatcacaaccagtatctcttaacgatgttcttcgcagatgatgattcattttttaagtatttggctagtcaagatgatgaatcttcattatctgatatattgcaaatcactcaatatctagactttctgttattattattgatccaatcaaaaaataaattagaagccgtgggtcattgttatgaatctctttcagaggaatacagacaattgacaaaattcacagactttcaagattttaaaaaactgtttaacaaggtccctattgttacagatggaagggtcaaacttaataaaggatatttgttcgactttgtgattagtttgatgcgattcaaaaaagaatcctctctagctaccaccgcaatagatcctattagatacatagatcctcgtcgcgatatcgcattttctaacgtgatggatatattaaagtcgaataaagtgaacaataattaattctttattgtcatcatgaacggcggacatattcagttgataatcggccccatgttttcaggtaaaagtacagaattaattagacgagttagacgttatcaaatagctcaatataaatgcgtgactataaaatattctaacgataatagatacggaacgggactatggacgcatgataagaataattttgaagcattggaagcaactaaactatgtgatgtcttggaatcaattacagatttctccgtgataggtatcgatgaaggacagttctttccagacattgttgaattctgtgagcgtatggcaaacgaaggaaaaatagttatagtagccgcactcgatgggacatttcaacgtaaaccgtttaataatattttgaatcttattccattatctgaaatggtggtaaaactaactgctgtgtgtatgaaatgctttaaggaggcttccttttctaaacgattgggtgaggaaaccgagatagaaataataggaggtaatgatatgtatcaatcggtgtgtagaaagtgttacatcgactcataatattatattttttatctaaaaaactaaaaataaacattgattaaattttaatataatacttaaaaatggatgttgtgtcgttagataaaccgtttatgtattttgaggaaattgataatgagttagattacgaaccagaaagtgcaaatgaggtcgcaaaaaaactaccgtatcaaggacagttaaaactattactaggagaattattttttcttagtaagttacagcgacacggtatattagatggtgccaccgtagtgtatataggatcggctcctggtacacatatacgttatttgagagatcatttctataatttaggagtgatcatcaaatggatgctaattgacggccgccatcatgatcctattttaaatggattgcgtgatgtgactctagtgactcggttcgttgatgaggaatatctacgatccatcaaaaaacaactgcatccttctaagattattttaatttctgatgtaagatccaaacgaggaggaaatgaacctagtacggcggatttactaagtaattacgctctacaaaatgtcatgattagtattttaaaccccgtggcatctagtcttaaatggagatgcccgtttccagatcaatggatcaaggacttttatatcccacacggtaataaaatgttacaaccttttgctccttcatattcagctgaaatgagattattaagtatttataccggtgagaacatgagactgactcgagttaccaaattagacgctgtaaattatgaaaaaaagatgtactaccttaataagatcgtccgtaacaaagtagttgttaactttgattatcctaatcaggaatatgactattttcacatgtactttatgctgaggaccgtatactgcaataaaacatttcctactactaaagcaaaggtactatttctacaacaatctatatttcgtttcttaaatattccaacaacatcaactgaaaaagttagtcatgaaccaatacaacgtaaagtatctagcaaagattttatgtctaaaaacagaaatagcaagagatccgtacgcagtaataaatagaaacgtactactgagatatactaccgatatagagtataatgatttagttactttaataaccgttagacataaaattgattctatgaaaactgtgtttcaggtatttaacgaatcatccataaattatactccggttgatgatgattatggagaaccaatcattataacatcgtatcttcaaaaaggtcataacaagtttcctgtaaattttctatacatagatgtggtaatatctgacttatttcctagctttgttagactagatactacagaaactaatatagttaatagtgtactacaaacaggtgatggtaaaaagactcttcgtcttcccaaaatgttagagacggaaatagttgtcaagattctctatcgccctaatataccattaaaaattgttagatttttccgcaataacatggtaactggagtagagatagccgatagatctgttatttcagtcgctgattaatcaattagtagagatgagataagaacattataataatcaataatatatcttatatcttatatcttatatcttatatcttatatcttatatcttatatcttgtttagaaaaatgctaatattaaaatagctaacgctagtaatccaatcggaagccatttgatatctataatagggtatctaatttcctgatttaaatagcggacagctatattctcggtagctactcgtttggaatcacaaacattatttacatctaatttactatctgtaatggaaacgtttcccaatgaaatggtacaatcagatacattacatcttgatatatttttttttaaagaggctggtaacaacgcatcgcttcgtttacatggctcgtaccaacaataatagggtaatcttgtatctattcctatccgtactatgcttttatcaggataaatacatttacatcgtatatcgtctttgttagcatcacagaatgcataaatttgttcgtccgtcatgataaaaatttaaagtgtaaatataactattattttatagttgtaataaaaagggaaatttgattgtataccttcggttctttaaaagaaactgacttgataaaaatggctgtaatctctaaggttacgtatagtctatatgatcaaaaagagattaatgctacagatattatcattagtcatgttaaaaatgacgacgatatcggtaccgttaaagatggtagactaggtgctatggatggggcattatgtaaaacttgtgggaaaacggaattggaatgtttcggtcactggggtaaagtaagtatttataaaactcatatagttaagcctgaatttatttcagaaattattcgtttactgaattatatatgtattcactgcggattattgcgttcacgagaaccgtattccgacgatattaacctaaaagagttatcgggacacgctcttaggagattaaaggataaaatattatccaagaaaaagtcatgttggaacagtgaatgtatgcaaccgtatcaaaaaattactttttcaaagaaaaaggtttgtttcgtcaacaagttggatgatattaacgttcctaattctctcatctatcaaaagttaatttctattcatgaaaagttttggccattattagaaattcatcaatatccagctaacttattttatacagactactttcccatccctccgttgattattagaccggctattagtttttggatagatagtatacccaaagaaaccaatgaattaacttacttattaggtatgatcgttaagaattgtaacttgaatgctgatgaacaggttatccagaaggcggtaatagaatacgatgatattaaaattatttctaataacacttccagtatcaatttatcatatattacatccggcaaaaataatatgattagaagttatatcgtcgcccggcgaaaagatcagaccgctagatctgtaattggtcccagtacatctatcaccgttaatgaggtaggaatgcccgcatatattagaaatacacttacagaaaagatatttgttaatgcctttacagtggataaagttaaacaactattagcgtcaaaccaagttaaattttactttaataaacgattaaaccaattaacaagaatacgccaaggaaagtttatcaaaaataaaatacatttattgcctggtgattgggtagaagtagctgttcaagaatatacaagtattatttttggaagacagccgtctctacatagatacaacgtcatcgcttcatctatcagagctaccgaaggagatactatcaaaatatctcccggaattgccaactctcaaaatgctgatttcgacggagatgaagaatggatgatattggagcaaaatcctaaagccgtaattgaacaaagtattcttatgtatccgacgacgttactcaaacacgatattcatggagcccccgtttatggatctattcaagatgaaatcgtagcagcgtattcattgtttaggatacaagatctttgtttagatgaagtattgaacatcttggggaaatatggaagagagttcgatcctaaaggtaaatgtaaattcagcggtaaagatatctatacttacttgataggtgaaaagattaattatccgggtctcttaaaggatggtgagattattgcaaacgacgtagatagtaattttgttgtggctatgaggcatctgtcattggctggactcttatccgatcataagtcgaacgtggaaggtatcaactttattatcaagtcatcttatgtttttaagagatatctatctatttacggttttggggtgacattcaaagatctgagaccaaattcgacgttcactaataaattggaggccatcaacgtagaaaaaatagaacttatcaaagaagcatacgccaaatatctcaacgatgtaagagacgggaaaatagttccattatctaaagctttagaggcggactatgtggaatccatgttatccaacttgacaaatcttaatatccgagagatagaagaacatatgagacaaacgctgatagatgatccagataataacctcctgaaaatggccaaagcgggttataaagtaaatcctacagaactaatgtatattctaggtacgtatggacaacaaaggattgatggtgaaccagcagagactcgagtattgggtagagtcttaccttactatcttccagactctaaggatccagaaggaagaggttacattcttaattctttaacaaaaggattaacgggttctcaatattacttttcgatgctggttgccagatctcaatctactgatatcgtctgtgaaacatcacgtaccggaacactggctagaaaaatcattaaaaagatggaggatatggtggtcgacggatacggacaagtagttataggtaatacgctcatcaagtacgccgccaattataccaaaattctaggctcagtatgtaaacctgtagatcttatctatccagatgagtccatgacttggtatttggaaattagtgctctgtggaataaaataaaacagggattcgtttactctcagaaacagaaacttgcaaagaagacattggcgccgtttaatttcctagtattcgtcaaacccaccactgaggataatgctattaaggttaaggatctgtacgatatgattcataacgtcattgatgatgtgagagagaaatacttctttacggtatctaatatagattttatggagtatatattcttgacgcatcttaatccttctagaattagaattacaaaagaaacggctatcactatctttgaaaagttctatgaaaaactcaattatactctaggtggtggaactcctattggaattatttctgcacaggtattgtctgagaagtttacacaacaagccctgtccagttttcacactactgaaaagagtggtgccgtcaaacaaaaacttggtttcaacgagtttaataacctgactaatttgagtaagaataagaccgaaattatcactctggtatccgatgatatctctaaacttcaatctgttaagattaatttcgaatttgtatgtttgggagaattaaatccaaacatcactcttcgaaaagaaacagataaatatgtagtagatataatagttaatagattatacatcaagagagcagaaataaccgaattagttgtcgaatatatgattgaacgatttatctcctttagcgtcattgtaaaggaatggggtatggagacattcattgaggacgaggataatattagatttactgtctatctaaatttcgttgaaccagaggaattgaatcttagtaagtttatgatggttcttccgggggcagccaacaagggaaagattagtaaattcaagattcctatctctgattatacgggttatgacgacttcaatcaaacaaaaaagctcaataagatgactgtagaactcatgaatctaaaagaattgggttctttcgatttggaaaacgtcaacgtgtatcctggagtatggaatacatacgatatcttcggtatcgaggccgctcgtgaatacttgtgcgaagccatgttaaacacctatggagaagggttcgattatctgtatcagccttgtgatcttctcgctagtttactatgtgctagttacgaaccagaatcagtgaataaattcaagttcggtgcagctagtactcttaagagagctacgttcggagacaataaagcattgttaaacgcggctcttcataaaaagtcagaacctattaacgataatagtagctgccacttttttagcaaggtccctaatataggaactggatattacaaatactttatcgacttgggtcttctcatgagaatggaaaggaaactatctgataagatatcttctcaaaagatcaaggaaatggaagaaacagaagacttttaattcttatcaataacatatttttctatgatctgtcttttaaacgatggattttccacaaatgcgcctctcaagtccctcatagaatgatacacgtataaaaaatatagcataggcaatgactccttatttttagacattagatatgccaaaatcatagccccgcttctatttactcccgcagcacaatgaaccaacacgggctcgtttcgttgatcacatttagataaaaaggcggttacgtcgtcaaaatatttactaatatcggtagttgtatcatctaccaacggtatatgaataatattaatattagagttaggcaatgtatatttatccatcgtcaaatttaaaacatatttgaacttaacttcagatgatggtgcatccatagcatttttataatttcccaaatacacattattggttacccttgtcattatagtgggagatttggctctgtgcatatctccagttgaacgtagtagtaagtatttatacaaacttttcttatccatttataacgtacaaatggataaaactactttatcggtaaacgcatgtaatttagaatacgttagagaaaaggctatagtaggcgtacaagcagccaaaacatcaacacttatattctttgttattatattggcaattagtgcgctattactctggtttcagacgtctgataatccagtctttaatgaattaacgagatatatgcgaattaaaaatacggttaacgattggaaatcattaacggatagcaaaacaaaattagaaagtgatagaggtaaacttctagccgctggtaaggatgatatattcgacttcaaatgtgtggatttcggcgcctattttatagctatgcgattggataagaaaacatatctgccgcaagctattaggcgaggtactggagacgcgtggatggttaaaaaggcggcaaaggtcgatccatctgctcaacaattttgtcagtatttgataaaacacaagtctaataatgttattacttgtggtaatgagatgttaaatgaattaggttatagcggttattttatgtcaccgcattggtgttccgattttagtaatatggaatagtgttagataaatgcggtaacgaatgttcctgtaaggaaccataacagtttagatttaacgttaaagatgagcataaacataataaacaaaattacaatcaaacctataacattaatatcaaacaatccaaaaaatgaaatcagtggagtagtaaacgcgtacataactcctggataacgtttagtagctgccgttcctattctagaccaaaaatttggtttcatgttttcgaagcggtgttctgcaacaagtcggggatcgtgttctacatatttggcggcattatccagtatctgcctattgatcttcatttcgttttcaattctggctatttcaaaataaaatcccgatgatagacctccagactttataatttcatctacgatgttcagcgccgtagtaactctaataatataggctgataagctaacatcataccctcctgtatatgtgaatatggcatgatttttgtccattacaagctcggttttaactttattgcctgtaataatttctctcatctgtaggatatctatttttttgtcatgcattgccttcaagacgggacgaagaaacgtaatatcctcaataacgttatcgttttctacaacaactacatattctacctttttattttctagctcggtaaaaaatttagaatcccatagggctaaatgtctagcgatatttcttttcgtttcctctgtacacatagtgttacaaaaccctgaaaagaagtgagtatacttgtcatcatttctaatgtttcctccagtccactgtataaacgcataatccttgtaatgatctggatcatccttgactaccacaacatttcttttttctggcataacttcgttgtcctttacatcatcgaacttctgatcattaatatgctcatgaacattaggaaatgtttctgatggaggtctatcaataactggcacaacaataacaggagttttcaccgccgccatttagttattgaaattaatcatatacaactctttaatacgagttatattttcgtctatccattgtttcacatttacatatttcgacaaaaagatataaaatgcgtattccaatgcttctctgtttaatgaattactaaaatatacaaacacgtcactgtctggcaataaatgatatcttagaatattgtaacaatttattttgtattgcacatgttcgtgatctatgagttcttcttcgaatggcataggatctccgaatctgaaaacgtataaataggagttagaataataatatttgagagtattggtaatatataaactctttagcggtataattagtttttttctctcaatttctatttttagatgtgatggaaaaatgactaattttgtagcattagtatcatgaactctaatcaaaatcttaatatcttcgtcacacgttagctctttgaagtttttaagagatgcatcagttggttctacagatggagtaggtgcaacaattttttgttctacacatgtatgtactggagccattgttttaactataatggtgcttgtatcgaaaaactttaatgcagatagcggaagctcttcgccgcgactttctacatcgtaattgggttctaacgccgatctctgaatggatactagttttctaagttctaatgtgattctctgaaaatgtaaatccaattcctccggcattatagatgtgtatacatcggtaaataaaactatagtatccaacgatcccttctcgcaaattctagtcttaaccaagaaatcgtatataactacggagatggcgtatttaagagtggattcttctaccgttttgttcttggatttcatataagaaactataaagtccgcactactgttaagaatgattactaacgcaactatatagttcaaattaagcattttggaaacataaaataactctgtagacgatacttgactttcgaataagtttgcagacaaacgaagaaagaacagacctctcttaatttcagaagaaaactttttttcgtattcctgacgtctagagtttatatcaataagaaagttaagaattagtcggttaatgttgtatttcattacccaagtttgagatttcataatattatcaaaagacatgataatattaaagataaagcgctgactatgaacgaaatagctatatggttcgctcaaaaatatagtcttgttaaacgtggaaacgataactgtatttttaatcacgtcagcggcatctaaattaaatataggtatatttattccacacactctacaatatgccacaccatcttcataataaataaattcgttagcaaagttattaattttagtgaaatagttagcgtcaactttcatagcttccttcaatctaatttgatgctcacacggtgcgaattccactctaacatcccttttccatgcctcaggttcatcgatctctataatatctagttttttgcgtttcacaaacacaggctcgtctctcgcgatgagatctgtatagtaactatgtaaatgataactagatagaaagatgtagctatatagatgacgatcctttaagagaggtataataactttaccccaatcagatagactgttgttatggtcttcggaaaaagaatttttataaatttttccagtattttccaaatatacgtacttgacatctaaaaaatccttaatgataataggaatggataatccgtctattttataaagaaatacatatcgcacattatacttttttttggaaatgggaataccgatgtgtctacataaatatgcaaagtctaaatattttttagagaatcttaattggtccaaattcttttccaagtacggtaatagatttttcatattgaacggtatcttcttaatctctggttctagttccgcattaaatgatgaaactaagtcactatttttataactaacgattacatcacctctaacatcatcatttaccagaatactgatcttcttttgtcgtaaatacatgtctaatgtgttaaaaaaaagatcatacaagttatacgtcatttcatctgtggtattcttgtcattgaaggataaactcgtactaatctcttctttaacagcctgttcaaatttatatcctatatacgaaaaaatagcaaccagtgtttgatcatccgcgtcaatattctgttctatcgtagtgtataacaatcgtatatcttcttctgtgatagtcgatacgttataaaggttgataacgaaaatatttttatttcgtgaaataaagtcatcgtaggattttggacttatattcgcgtctagtagatatgcttttatttttggaatgatctcaattagaatagtctctttagagtccatttaaagttacaaacaactaggaaattggtttatgatgtataatttttttagtttttatagattctttattctatacttaaaaaatgaaaataaatacaaaggttcttgagggttgtgttaaattgaaagcgagaaataatcataaattatttcattatcgcgatatccgttaagtttgtatcgtaatggcgtggtcaattacaaataaagcggatactagtagcttcacaaagatggctgaaatcagagctcatctaaaaaatagcgctgaaaataaagataaaaacgaggatattttcccggaagatgtaataattccatctactaagcccaaaaccaaacgagccactactcctcgtaaaccagcggctactaaaagatcaaccaaaaaggaggaagtggaagaagaagtagttatagaggaatatcatcaaacaactgaaaaaaattctccatctcctggagtcagcgacattgtagaaagcgtggccgctgtagagctcgatgatagcgacggggatgatgaacctatggtacaagttgaagctggtaaagtaaatcatagtgctagaagcgatctttctgacctaaaggtggctaccgacaatatcgttaaagatcttaagaaaattattactagaatctctgcagtatcgacggttctagaggatgttcaagcagctggtatctctagacaatttacttctatgactaaagctattacaacactatctgatctagtcaccgagggaaaatctaaagttgttcgtaaaaaagttaaaacttgtaagaagtaaatgcgtgcacttttttataaagatggtaaactctttaccgataataattttttaaatcctgtatcagacgataatccagcgtatgaggttttgcaacatgttaaaattcctactcatttaacagatgtagtagtatatgaacaaacgtgggaggaggcgttaactagattaatttttgtgggaagcgattcaaaaggacgtagacaatacttttacggaaaaatgcatgtacagaatcgcaacgctaaaagagatcgtatttttgttagagtatataacgttatgaaacgaattaattgttttataaacaaaaatataaagaaatcgtccacagattccaattatcagttggcggtttttatgttaatggaaactatgttttttattagatttggtaaaatgaaatatcttaaggagaatgaaacagtagggttattaacactaaaaaataaacacatagaaataagtcccgatgaaatagttatcaagtttgtaggaaaggacaaagtttcacatgaatttgttgttcataagtctaatagactatataaaccgctattgaaactgacggatgattctagtcccgaagaatttctgttcaacaaactaagtgaacgaaaggtatacgaatgtatcaaacagtttggtattagaatcaaggatctccgaacgtatggagtcaattatacgtttttatataatttttggacaaatgtaaagtccatatctcctcttccatcaccaaaaaagttaatagcgttaactatcaaacaaactgctgaagtggtaggtcatactccatcaatttcaaaaagagcttacatggcaacgactattttagaaatggtaaaggataaaaattttttagatgtagtatctaaaactacgttcgatgaattcctatctatagtcgtagatcacgttaaatcatctacggatggatgatatagatctttacacaaataattacaagaccgataaatggaaatggataagcgtatgaaatctctcgcaatgaccgctttctttggggagctaagcacattagatattatggcattgataatgtctatatttaaacgccatccaaacaataccattttttcagtggataaggatggtcagtttatgattgatttcgaatacgataattataaggcttctcaatatttggatctgaccctcactccgatatttggagatgaatgcaagactcacgcatcgagtatagccgaacaattggcgtgtgcggatattattaaagaggatattagcgaatacatcaaaactactccccgtcttaaacgatttataaaaaaataccgcaatagatcagatactcgcatcagtcgagatacagaaaagcttaaaatagctctagctaaaggcatagattacgaatatataaaagacgcttgttaataagtaaatgaaaaaaaactagtcgtttataataaaacacaatatggatgccaacatagtatcatcttctactattgcaacgtatatagacgctttagcgaagaatgcttcagaattagaacagaggtctaccgcatacgaaataaataatgaattggaactagtatttattaagccgccattaattactttgacaaatgtagtgaatatctctacgattcaggaatcgtttattcgatttaccgttactaataaggaaggtgttaaaattagaactaagattccattatctaaggtacatggtctagatgtaaaaaatgtacagttagtagatgctatagataacatagtttgggaaaagaaatcattagtgacggaaaatcgtcttcacaaagaatgcttgttgagactatcgacagaggaacgtcatatatttttggattacaagaaatatggatcctctatccgactagaattagtcaatcttattcaagcaaaaacaaaaaactttacgatagactttaagctaaaatattttctaggatccggtgcccaatctaaaagttctttgttgcacgctattaatcatccaaagtcaaggcctaatacatctctggaaatagaattcacacctagagacaatgaaaaagttccatatgatgaactaataaaggaattgacgactctatcacgtcatatatttatggcttctccagagaatgtaattctttctccgcctattaacgcacctataaagacttttatgttgcctaaacaagatatagtaggtctggatctggaaaatctatatgccgtaactaagactgacggcattcctataactatcagagttacatcaaacgggttgtattgttattttacacatcttggttatattattagatatcctgttaagagaataatagattccgaagtagtagtctttggtgaggcagttaaggataagaactggaccgtatatctcattaagctaatagagcctgtgaatgcaatcaatgatagactagaagaaagtaagtatgttgaatctaaactagtggatatttgtgatcggatagtattcaagtcaaagaaatatgaaggtccgtttactacaactagtgaagtcgtcgatatgttatctacatatttaccaaagcaaccagaaggtgttattctgttctattcaaagggacctaaatctaacattgattttaaaattaaaaaggaaaatactatagaccaaactgcaaatgtagtatttaggtacatgtccagtgaaccaattatctttggagaatcgtctatctttgtagagtataagaaatttagcaacgataaaggctttcctaaagaatatggttctggtaagattgtgttatataacggcgttaattatctaaataatatctattgtttggaatatattaatacacataatgaagtgggtattaagtccgtggttgtacctattaagtttatagcagaattcttagttaatggagaaatacttaaacctagaattgataaaaccatgaaatatattaactcagaagattattatggaaatcaacataatatcatagttgaacatttaagagatcaaagcatcaaaataggagatatctttaacgaggataaactatcggatgtgggacatcaatacgccaataatgataaatttagattaaatccagaagttagttattttacgaataaacgaactagaggaccgttgggaattttatcaaactacgtcaagactcttcttatttctatgtattgttccaaaacatttttagacgattccaacaaacgaaaggtattggcgattgattttggaaacggtgctgacctggaaaaatacttttatggagagattgcgttattggtagcgacggatccggatgctgatgctatagctagaggaaatgaaagatacaacaaattaaactctggaattaaaaccaagtactacaaatttgactacattcaggaaactattcgatccgatacatttgtctctagtgtcagagaagtattctattttggaaagtttaatatcatcgactggcagtttgctatccattattcttttcatccgagacattatgctaccgtcatgaataacttatccgaactaactgcttctggaggcaaggtattaatcactaccatggacggagacaaattatcaaaattaacagataaaaagacttttataattcataagaatttacctagtagcgaaaactatatgtctgtagaaaaaatagctgatgatagaatagtggtatataatccatcaacaatgtctactccaatgactgaatacattatcaaaaagaacgatatagtcagagtgtttaacgaatacggatttgttcttgtagataacgttgatttcgctacaattatagaacgaagtaaaaagtttattaatggcgcatctacaatggaagatagaccgtctacaaaaaactttttcgaactaaatagaggagccattaaatgtgaaggtttagatgtcgaagacttacttagttactatgttgtttatgtcttttctaagcggtaaataataatatggtatgggttctgatatccccgttctaaatgcattaaataattccaatagagcgatttttgttcctataggaccttccaactgtggatactctgtattgttaatagatatattaatacttttgtcgggtaacagaggttctacgtcttctaaaaataaaagtttgataacatctggcctgttcataaataaaaacttggcgattctatatatactcttattatcaaatctagccattgtcttatagatgtgagctactgtaggtgtaccatttgattttctttctaatactatatatttctctcgaagaagttcttgcacatcatctgggaataaaatactactgttgagtaaatcagttattttttttatatcgatattgatggacatttttatagttaaggataataagtatcccaaagtagataacgacgataacgaagtatttatacttttaggaaatcacaatgactttatcagatcaaaattaacaaaattaaaggagcatgtatttttttctgaatatattgtgactccagataaatatggatctttatgcgtcgaattaaatgggtctagttttcagcacggcggtagatatatagaggtggaggaatttatagatgctggaagacaagttagatggtgttctacatccaatcatatatctgaagatatacccgaagatatacacactgataaatttgtcatttatgatatatacacttttgacgctttcaagaataaacgattggtattcgtacaggtacctccgtcgttaggagatgatagctatttgactaatccgttattgtctccgtattatcgtaattcagtagccagacaaatggtcaatgatatgatttttaatcaagattcatttttaaaatatttattagaacatctgattagaagccactatagagtttctaaacatataacaatagttagatacaaggataccgaagaattaaatctaacgagaatatgttataatagagataagtttaaggcgtttgtattcgcttggtttaacggcgtttcggaaaatgaaaaggtactagatacgtataaaaaggtatctaatttgatataatgaattcagtgactgtatcacacgcgccatatactattacttatcacgatgattgggaaccagtaatgagtcaattggtagagttttataacgaagtagccagttggctgctacgagacgagacgtcgcctattcctgataagttctttatacagttgaaacaaccgcttagaaataaacgagtatgtgtgtgcggtatagatccgtatccgaaagatggaactggtgtaccgttcgaatcaccaaattttacaaaaaaatcaattaaggagatagcttcatctatatctagattaaccggagtaattgattataaaggttataaccttaatataatagacggggttataccctggaattattacttaagttgtaaattaggagaaacaaaaagtcacgcgatctactgggataagatttccaagttactgctgcagcatataactaaacacgttagtgttctttattgtttgggtaaaacagatttctcgaatatacgggcaaagttagaatccccggtaactaccatagtgggatatcatccagcggctagagaccgtcaattcgagaaagatagatcatttgaaattatcaacgttttactggaattagacaacaaggtacctataaattgggctcaagggtttatttattaatgctttagtgaaattttaacttgtgttctaaatggatgcaactattagaggtaatgatgttatctttgttcttaagactataggtgtcccgtcagcgtgcagacaaaatgaagatccaagattcgtagaagcatttaaatgcgacgagttagaaagatatattgagaataatccagaatgtacactattcgaaagtcttagggatgaggaagcatactctatagtcagaattttcatggatgtagatttagacgcgtgtctagacgaaatagattatttaacggctattcaagattttattatcgaggtgtcaaactgtgtagctagattcgcgtttacagaatgcggtgccattcatgaaaatgtaataaaatccatgagatctaatttttcattgactaagtctacaaatagagataaaacaagttttcatattatctttttagacacgtataccactatggatacattgatagctatgaaacgaacactattagaattaagtagatcatctgaaaatccactaaccagatcgatagacactgccgtatataggagaaaaacaactcttcgggttgtaggtactaggaaaaatccaaattgcgacactattcatgtaatgcaaccacctcatgataatatagaagattacctattcacttacgtggatatgaacaacaatagttattacttttctctacaacgacgattggaggatttagttcctgataagttatgggaaccagggtttatttcattcgaagacgctataaaaagagtttcaaaaatattcattaattctataataaactttaatgatctcgatgaaaataattttacaacggtaccactggtcatagattacgtaacaccttgtgcattatgtaaaaaacgatcgcataaacatccgcatcaactatcgttggaaaatggtgctattagaatttacaaaactggtaatccacatagttgtaaagttaaaattgttccgttggatggtaataaactgtttaatattgcacaaagaattttagacactaactctgttttattaaccgaacgaggagaccatatagtttggattaataattcatggaaatttaacagcgaagaacccttgataacaaaactaattttgtcaataagacatcaactacctaaggaatattcaagcgaattactctgtccaagaaaacgaaagactgtagaagctaacatacgagacatgttagtagattcagtggagaccgatacctatccggataaacttccgtttaaaaatggtgtattggacctggtagacggaatgttttactctggagatgatgctaaaaaatatatgtgtactgtatcaaccggatttaaatttgacgatacaaagttcgtcgaagacagtccagaaatggaagagttaatgaatatcattaacgatatccaaccattaacggatgaaaataagaaaaatagagagctatatgaaaaaacattatctagttgtttatgcggtgctaccaaaggatgtttaacattcttttttggagaaactgcaactggaaagtcgacaaccaaacgtttgttaaagtctgctatcggtgacctgtttgttgagacgggtcaaacaattttaacagatgtattggataaaggacctaatccatttatcgctaacatgcatttgaaaagatctgtattctgtagcgaactacctgattttgcctgtagtggatcaaagaaaattagatctgacaatattaaaaagttgacagaaccttgtgtcattggaagaccgtgtttctccaataaaattaataatagaaaccatgcgacaatcattatcgatactaattacaaacctgtttttgataggatagataacgcattaatgagaagaattgccgtcgtgcgattcagaacacacttttctcaaccttctggtagagaggctgctgaaaataatgacgcgtacgataaagtcaaactattagacgaggggttagatggtaaaatacaaaataatagatatagattcgcatttctatacttgttggtgaaatggtacagaaaatatcatgttcctattatgaaactatatcctacacccgaagagattcctgactttgcattctatctcaaaataggtactctgttagtatctagctctgtaaagcatattccattaatgacggacctctccaaaaagggatatatattgtacgataatgtggttactcttccgttgactactttccaacagaaaatatccaagtattttaattctagactatttggacacgatatagagagcttcatcaatagacataagaaatttgccaatgttagtgatgaatatctgcaatatatattcatagaggatatttcatctccgtaaatatatgctcatatatttatagaagatatcacatatctaaatgaataccggaattatagatttatttgataatcatgttgatagtataccaactatattgcctcatcagttagctactctagattatctagttagaactatcatagatgagaacagaagcgtgttattgttccatattatgggatcaggtaaaacaataatcgctttgttgttcgccttggtagcttccagatttaaaaaggtttacattctagtgccgaacatcaacatcttaaaaattttcaattataatatgggtgtagctatgaacttgtttaatgacgaattcatagctgagaatatctttattcattccacaacaagtttttattctcttaattataacgataacgtcattaattataacggattatctcgctacaataactctatttttatcgttgatgaggcacataatatctttgggaataatactggagaacttatgaccgtgataaaaaataaaaacaagattccttttctactattgtctggatctcccattactaacacacctaatactctgggtcatattatagatttaatgtccgaagagacgatagattttggtgaaattattagtcgtggtaagaaagtaattcagacacttcttaacgaacgaggtgtgaatgtacttaaggatttgcttaaaggaagaatatcatattacgaaatgcctgataaagatctaccaacgataagatatcacggacgtaagtttctagatactagagtagtatattgtcacatgtctaaacttcaagagagagattatatgattactagacgacagctatgttatcatgaaatgtttgataaaaatatgtataacgtgtcaatggcagtattgggacaacttaatctgatgaataatttagatactttatttcaggaacaggataaggaattgtacccaaatctgaaaataaataatggcgtgttatacggagaagaattggtaacgttaaacattagttccaaatttaaatactttattaatcggatacagacactcaacggaaaacattttatatacttttctaattctacatatggcggattggtaattaaatatatcatgctcagtaatggatattctgaatataatggttctcagggaactaatccacatatgataaacggcaaaccaaaaacatttgctatcgttactagtaaaatgaaatcgtctttagaggatctattagatgtgtataattctcctgaaaacgatgatggtagtcaattgatgtttttgttttcatcaaacattatgtccgaatcctatactctaaaagaggtaaggcatatttggtttatgactatcccagatactttttctcaatacaaccaaattcttggacgatctattagaaaattctcttacgccgatatttctgaaccagttaatgtatatcttttagccgccgtatattccgatttcaatgacgaagtgacgtcattaaacgattacacacaggatgaattaattaatgttttaccatttgacatcaaaaagctgttatatctaaaatttaagacgaaagaaacgaatagaatatactctattcttcaagagatgtctgaaacgtattctcttccaccacatccatcaattgtaaaagttttattgggagaattggtcagacaatttttttataataattctcgtattaagtataacgataccaagttacttaaaatggttacatcagttataaaaaataaagaagacgctaggaattacatagatgatattgtaaacggtcacttctttgtatcgaataaagtatttgataaatctcttttatacaaatacgaaaacgatattattacagtaccgtttagactttcctacgaaccatttgtttggggagttaactttcgtaaagaatataacgtggtatcttctccataaaactgatgagatatataaagaaataaatgtcgagctttgttaccaatggataccttccagttacattggagccacacgagctgacgttagacataaaaactaatattaggaatgccgtatataagacgtatctccatagagaaattagtggtaaaatggccaagaaaatagaaattcgtgaagacgtggaattacctctcggcgaaatagttaataattctgtagttataaacgttccgtgtgtaataacctacgcgtattatcacgttggggatatagtcagaggaacattaaacatcgaagatgaatcaaatgtaactattcaatgtggagatttaatctgtaaactaagtagagattcgggtactgtatcatttagcgattcaaagtactgcttttttcgaaatggtaatgcgtatgacaatggcagcgaagtcactgccgttctaatggaggctcaacaaggtatcgaatctagttttgtttttctcgcgaatatcgtcgactcataagaaagagaatagcggtaagtataaacacgaatactatggcaataattgcgaatgttttattcccttcgatatatttttgataatatgaaaaacatgtctctctcaaatcggacaaccatctcataaaatagttatctcgcgctggcgaggtggttgccgctcgtataatctccccagaataatatacttgcgtgtcgtcgttcaatttatacggatttctatagttctctgttatataatgcggttttccatcatgattagacgacgacaatagtgttctaaatttagatagttgatcagaatgaatgtttattggcgttggaaaaattatccatgctgcgtctgcagagtggttgatagttgttcctagatatgtaaaataatccaacgtactaggtagcaaattgtctagataaaatactgaatcaaacggcgcagacgtattagcggatctaatggaatccaattgattgactatcttttgaaaatatacatttttatgatccgatacttgtaagaatatagaaataatgataagtccatcatcgtgtttttttgcctcttcataagaactatattttttcttattccaatgaacaagattaatctctccagagtatttgtacacatctatcaagtgattggatccataatcgtcttcctttccccaatatatatgtagtgatgataacacatattcattggggagaaaccctccacttatatatcctcctttaaaattaatccttactagttttccagtgttctggatagtggttggtttcgactcattataatgtatgtctaacggcttcaatcgcgcgttagaaattgcttttttagtttctatattaataggagatagttgttgcggcatagtaaaaatgaaatgataactgtttaaaaatagctcttagtatgggaattacaatggatgaggaagtgatatttgaaactcctagagaattaatatctattaaacgaataaaagatattccaagatcaaaagacacgcatgtgtttgctgcgtgtataacaagtgacggatatccgttaataggagctagaagaacttcattcgcgttccaggcgatattatctcaacaaaattcagattctatctttagagtatccactaaactattacggtttatgtactacaatgaactaagagaaatctttagacggttgagaaaaggttctatcaacaatatcgatcctcactttgaagagttaatattattgggtggtaaactagataaaaaggaatctattaaagattgtttaagaagagaattaaaagaggaaagtgatgaacgtataacagtaaaagaatttggaaatgtaattctaaaacttacaacacgggataaattatttaataaagtatatataggttattgcatggcgtgttttattaatcaatcgttggaggatttatcgcatactagtatttacaatgtagaaattagaaagattaaatcattaaatgattgtattaacgacgataaatacgaatatctgtcttatatttataatatgctagttaatagtaaatgaacttttacagatctagtataattagtcagattattaagtataatagacgactagctaagtctattatttgcaaggatgactctcaaattattacactcacggcattcgttaaccaatgcctatggtgtcataaacgagtatccgtgtccgctattttattaactactgataacaaaatattagtatgtaacagacgagatagttttctctattctgaaataattagaactagaaacatgtttagaaagaaacgattatttctgaattattccaattatttgtccaaacaggaaagaagtatactatcgtcatttttttctctatatccagctactgctgataatgatagaatagacgctatttatccgggtggcatacccaaaaggggtgagaatgttccagagtgtctatccagggaaatcaaagaagaagttaatatagacaattcttttgtattcatagacactcggttttttattcatggtatcatagaagataccattatcaacaaattttttgaggtaattttctttgtcggaagaatatctctaacgagtgatcaaattattgatacctttaaaagtaatcatgaaatcaaggatctaatatttttagatccgaattcaggtaatggactccaatacgaaattgcaaaatatgctctagatactgcaaaacttaaatgttacggccatagaggatgttattacgaatcattaaaaaaattaactgaggatgattgattagaaaatataaattaatttaccatcgtgtatttttataacgggattgtccggcatatcatgtagatagttaccgtctacatcgtatactcgaccatctacgcctttaaatcctctatttattgacattaatctattagaattggaataccaaatattagtaccctcaattagtttattggtaatattttttttagacgatagatcgatggctcttgaaaccaaggttttccaaccggactcattgtcgatcggtgagaagtctttttcattagcatgaatccattctaatgatgtatgtttaaacactctaaacaattggacaaattcttttgatttgctttgaatgatttcaaataggtcttcgtctacagtaggcataccattagataatctagccattataaagtgcacgtttacatatctacgttctggaggagtaagaacgtgactattgagacgaatggctcttcctactatctgacgaagagacgcctcgttccatgtcatatctaaaatgaagatatcattaattgagaaaaaactaataccctcgcctccactagaagagaatacgcatgttttaatgcattctccgttagtgtttgattcttggttaaactcagccaccgccttgattctagtatcttttgttctagatgagaactctatattagagataccaaagactttgaaatatagtaataagatttctattcctgactgattaacaaatggttcaaagactagacatttaccatgggatgctaatattcccaaacatacatctataaatttgacgcttttctcttttaattcagtaaatagagagatatcagccgcactagcatcccctttcaatagttctccctttttaaaggtatttaatgcggatttagaaaactctctatctcttaatgaatttttaaaatcattatatagtgttgctatctcttgcgcgtattcgccgggatcacgattttgtctttcaggaaagctatcgaacgtaaacgtagtagccatacgtctcagaattctaaatgatgatataccagtttttatttctgcgagtttagccttttgataaatctcttcttgcttttttgacatattaacgtatcgcattaatactgttttcttagcgaatgatgcagacccttctacgttatcaaaaatagaaaactcgttattaactatgtacgaacataggcctcctagtttggagactaattctttttcatcgactagacgtttattctcaaatagtgattggtgttgtaaggatcctggtcgtagtaagttaaccaacatggtgaattcttgcacactattgacgataggtgtagccgataaacaaatcatcttatggttttttaatgcgatggtcttggataaaaaattatatactgaacgagtaggacggatcttaccatcttctttgattaatgatttagaaatgaagttatgacattcatcaataatgacgcatattctactcttggaattaatagttttgatattagtaaaaaatttatttctaaaattttgatcatcgtaattaataaaaatacaatccttcgttatctctggagcgtatctgagtatagtgttcatccaaggatcttctatcaaagcctttttcaccaataagataatagcccaattcgtataaatatccttaagatgtttgagaatatatacagtagtcattgttttaccgacacccgtttcatggaacaataaaagagaatgcatactgtctaatcctaagaaaactcttgctacaaaatgttgataatccttgaggcgtactacgtccgaccccatcatttcaacgggcatattagtagttctgcgtaaggcataatcgatataggccgcgtgtgatttactcatttatgagtgataagtaataactatgttttaaaaatcacagcagtagtttaactagtcttctctgatgtttgttttcgatactttttgaatcagaagtcatactagaataaagcaacgagtgaacgtaatagagagcttcgtatactctattcgaaaactctaagaacttattaatgaattccgtatccactggattgtttaaaatactaaattgaacactgttcacatccttccaagaagaagacttagtgacggacttaacatgagacataaataaatccaaattttttttacaaacatcactagccaccataatggcgctatctttcaaccagctatcgcttacgcattttagcagtctaacatttttaaagagactacaatatattctcatagtatcgattacacctctaccgaataaagttggaagtttaataatacaatatttttcgtttacaaaatcaaataatggtcgaaacacgtcgaaggttaacatcttataatcgctaatgtatagattgttttcagtgagatgattattagatttaatagcatctcgttcacgtttgaacagtttattgcgtgcgctgaggtcggcaactacggcgtccgctttagtactcctcccataatactttacgctattaatctttaaaatttcatagactttatctagatcgctttctggtaacatgatatcatgtgtaaaaagttttaacatgtcggtcggcattctatttagatcattaactctagaaatctgaagaaagtaattagctccgtattccagactaggtaatgggcttttacctagagacagattaagttctggcaatgtttcataaaatggaagaaggacatgcgttccctcccggatattttttacaatttcatccatttacaactctatagtttgttttcattattattagttattatctcccataatcttggtaatacttaccccttgatcgtaagataccttatacaggtcattacatacaactaccaattgtttttgtacataatagattggatggttgacatccatggtggaataaactactcgaacagatagtttatctttccccctagatacattagccgtaatagttgtcggcctaaagaatatctttggtgtaaagttaaaagttagggttcttgttccattattgctttttgtcagtagttcattataaattctcgagatgggtccgttctctgaatatagaacatcatttccaaatctaacttctagtctagaaataatatcggtcttattcttaaaatctattcccttgatgaagggatcgttaatgaacaaatccttggcctttgattcggctgatctattatctccgttatagacgttacgttgactagtccaaagacttacaggaatagatgtatcgatgatgttgatactatgtgatatgtgagcaaagattgttctcttagtggcatcactatatgttccagtaatggcggaaaactttttagaaatgttatatataaaagaattttttcgtgttccaaacattaacagattagtatgaagataaacactcatattatcaggaacattatcaatttttacatacacatcggcatcttgaatagaaacgataccatcttctggaacctcaacaatctcggcagactccggataaccagtcggtggaccatcgctaacaataactagatcatccaacaatctactcacatatgcatctatataatctttttcatcttgtgagtaccctggatacgaaataaatttattatccgtatttccataataaggtttagtataaacagagagcgatgttgccgcatgaacttcagttacagtcgccgttggttggtttatttgacctattactctcctaggtttctctataaacgatggtttaatttgtacattcttaaccatatatccaataaagctcaattcaggaacataaacaaattctttgttgaacgtttcaaagtcgaacgaagagtcacgaataacgatatcggatactggattgaaggttaccgttacggtaatttttgaatcggatagtttaagactgctgaatgtatcttccacatcaaacggagttttaatataaacgtatactgtagatggttctttaatagtgtcattaggagttaggccaatagaaatatcattaagttcactagaatatccagagtgtttcaaagcaattgtattattgatacaattattatataattcttcgccctcaatttcccaaataacaccgttacacgaagagaccgatacgtaattaatacatttatatccaacatatggtacgtaaccgaatcttcccatacctttaacttctggaagttccaaactcagaaccaaatgattaagcgcagtaatatactgatccctaatttcgaagctagcgatagcctgattgtctggaccatcgtttgtcataactccggatagagaaatatattgcggcatatataaagttggaatttgactatcgactgcgaagacattagaccgtttaatagagtcatccccaccgatcaaagaattaatgatagtattattcattttctatttaaaatggaaaaagcttacaataaactccgtagagaaatatctataatttgtgagttttccttaaagtaacagcttccgtaaacgccgtctttatctcttagtaagtttattgtatttataaccttttccttatcttcatagaatactaaaggcaacaaagaaatttttggttcttctctaagagctacgtgagacttaaccatagaagccaacgaatccctacatattttagaacagaaataccctacttcaccacccttgtatgtctcaatactaataggtctaaaaaccaaatcttgattacaaaaccaacacttatcaattacactatttgtcttaatagacacatctgccatagatttataatactttggtagtatacaagcgagtgcttcttctttagcgggcttaaagactgctttaggtgctgaaataaccacatctggaaggcttactcgcttagccatttaattacggaactatttttttatacttctaatgagcaagtagaaaacctctcatctacaaaaacgtactcgtgtccataatcctctaccatagtaacacgttttttagatctcatatgtgctaaaaagttttcccatactaattggttactattatttttcgtataatttttaacagtttgaggttttagatttttagttacagaagtgatatcgaatattttatccaaaaagaatgaataattaattgtcttagaaggagtgttttcttggcaaaagaataccaagtgcttaaatatttctactacttcattaatcttttctgtactcagattcagtttctcatcttttacttgattgattatttcaaagactaacttataatcctttttatttattctctcgttagccttaagaaaactagatacaaaatttgcatctacatcatccgtggatatttgatttttttccatgatatccaagagttccgagataatttctccagaacattgatgagacaataatctccgcaatacatttctcaaatgaataagtttattagacacgtggaagtttgactttttttgtacctttgtacatttttgaaatacagactcgcaaaaaatacaatattcatatccttgttcagatactataccgttatgtctacaaccgctacataatcgtagattcatgttaacactctacgtatctcgtcgtccaatattttatataaaaacattttatttctagacgttgccagaaaatcctgtaatatttttagttttttgggctgtgaataaagtatcgccctaatatggttaccgtcctccgccaatatagtagttaaattatccgcacatgcagaagaacaccgcttaggcggattcagtacaatgttatatttttcgtaccaactcatttaaatatcataatctaaaatagttctgtaatatgtctagcgctaatatattgatcataatcctgtgcataaattaagatacaacaatgtctcgaaatcatcgacatggcttcttccatagttagaagatcgtcgtcaaagttagcaacgtgattcatcaacatttgctgttttgaggcagcaaatactgaaccatcgccattcaaccattcataaaaaccatcgtctgaatccattgataatttcttgtactggtttttgagagctcgcatcaatctagcatttctagctcccggattgaaaacagaaagaggatcgtacatccagggtccattttctgtaaatagaatcgtataatgtcccttcaagaagatatcagacgatccacaatcaaagaattggtctccgagtttgtaacaaactgcggactttaacctatacatgataccgtttagcataatttctggtgatacgtcaatcggagtatcatctattagagatctaaagccggtgtaacattctccaccaaacatattcttattctgacgtcgttctacataaaacatcattgctccattaacgataacaggggaatgaacagcactacccatcacattagttcccaatggatcaatgtgtgtaactccagaacatcttccatatcctatgttaggaggagcgaacaccactcttccactattgccatcgaatgccatagaataaatatccttggaattgatagaaatcggactgtcggatgttgtgatcatcttcataggattaacaactatgtatggtgccgcctgaagtttcatatcgtaactgatgccgtttataggtctagccacagaaaccaacgtaggtctaaatccaactatagacaaaatagaagccaatatctgttcctcatctgtcataacttgagagcatccagtatgaataatcttcattagatggggatctaccgcatcatcatcgttacaataaaaaattcccattctaatgttcataattgcttttctaatcatggtatgcatgtttgctctctgaatctctgtggaaattagatctgatacacctgtaatcactatcggattatcctccgtaagacgattaaccaacaacatataattataagactttacttttctaaattcataaagttgctggattaggctataggtgtctccatgtacatacgcgttctcgagcgcaggaagtttaataccgaatagtgccatcagaataggatgaatatagtaattagtttctggttttctataaataaaagacaaatcttgtgaactagacatatcggtaaaatgcatggattggaatcgtgtagtcgacagaagaatatgatgattagatggagagtatattttatctaactctttgagttggtcaccgattctaggactagctcgagaatgaataagtactaaaggatgagtacatttcacagaaacactagcattgttcaatgtgctctttacatgggtaaggagttgaaatagctcgtttctatttgttctgacaatatttagtttattcataatgttaagcatatcctgaatagtaaagttagatgtgtcatacttgttagtagttagatatttagcaattgcattcccatcatttctcaatctcgtactccaatcatgcgtggatgctacttcgtcgatggaaaccatacaatcctttttgataggctgttgagattgattatttcctgcacgtttaggtttggtacgttgatttctagcccctgcagatataaagtcatcgtctacaattttggataatgaattgcatacactacaagacaaagatttatcagaagtgtgaatatgatcttcatctaccaaagaaagagtttgattagtataactagattttagtcctgcgttagatgttaaaaaaacatcgctattgaccacggcttccattatttatattcgtagtttttactcgaaagcgtgattttaatatccaatcttattacttttggaatcgttcaaaacctttgactagttgtagaatttgatctattgccctacgcgtatactcccttgcatcatatacgttcgtcaccagatcgtttgtttcggcctgaagttggtgcatatctttttcaacactcgacatgagatccttaagggccatatcgtctagattttgttgagatgctgctcctggatttggattttgttgtgctgttgtacatactgtaccaccagtaggtgtaggagtacatacagtggccacaataggaggttgaggaggtgtaaccgttggagtagtacaagaaatacttccatccgattgttgtgtacatgtagttgttggtaacgtctgagaaggttgggtagatggcggtgtcgtcgtcttttgatctttattaaatttagagataatatcctgaacagcattgctcggcgtcaacgctggaaggagtgaactcgccggcgcatcagtatctgcagacagccaatcaaaaagattagacatatcagatgatgtattagtttgttgtcgtggttttggtgtaggagcagtactactaggtagaagaataggagccgatgtaggtgtcggaaccggaaccggctgtggagttatatgaatagttggttgtagcggttggataggctgtctgctggcggccatcatattatctctagctagttgttctcgcaactgtctttgataatacgactcttgagactttagtcctatttcaatcgcttcatcctttttcgtatccggatcctttttttcagaataatagattgacgactttggtgtagaggattctgccagcccctgtgagaacttgttaaagaagtccatttaaggctttaaaattgaattgcgattataagattaaatggcagacacagacgatattatcgactatgaatccgatgatctcactgaatacgaggatgatgaagaagaggaagaagatggagagtcactagaaactagtgatatagatcccaaatcttcttataagattgtagaatcagcatccactcatatagaagatgcgcattccaatcttaaacatatagggaatcatatatctgctcttaaacgacgctatactagacgtataagtctatttgaaatagcgggtataatagcagaaagctataacttgcttcaacgaggaagattacctctagtttcagaattttctgacgaaacgatgaagcaaaatatgctacatgtaattatacaagagatagaggagggttcttgtcctatagtcatcgaaaagaacggagaattgttgtcggtaaacgattttgacaaagatggtctaaaattccatctagactatattatcaaaatttggaaacttcaaaaacgatattagaatttatacgaatatcgttctctaaatgtcacaatcaagtctcgcatgttcagcaatttattgtcgtactttatatcgtgttcattaacgatatcttgcaaaatagtaatgattctatcttccttcgatagatattcttcagagattattgtcttatattctttcttgttatccgatatgaatttgataagactttgaacattattaatacccgtctgtttaattttttctacagatattttagttttggcagattctatcgtatctgtcaatagacatccaacatcgacattcgacgtcaattgtctataaatcaacgtataaattttagaaataacattagcgaattgttgtgcattgatgtcgttattctgaaacagtatgattttaggtagcattttcttaacaaagagaacgtatttattgttactcagttgaacagatgatatatccagattactaacgcatctgattccgtataccaaactttcagaagaaatggtgtacaattgtttgtattcattcaatgtctccttttcagaaattagtttagagtcgaatactgcaataattttcaagagatagttttcatcagataagattttatttagtgtagatatgataaaactattgttttgttggagaacttgatacgccgcgttctctgtagtcgacgctctcaaatgggaaacgatctccattatttttttggaatcggatactatatcttcggtatcttgacgcagtctagtatacatagagttaagagagattagagtttgtacattaagcaacatgtctctaaatgtggctacaaacttttcctttttcacataatctagtttattatataccgatttcacaacggcaccagatttaaggaaccagaatgaaaaactctgataactacaatatttcatcatagttacgattttatcatcttctatagttggtgtaatagcgcatacctttttctccaagactggaaccaacgtcataaaaatgtttaaatcaaaatccatatcaacatctgatgcgctaagaccagtctcgcgttcaagattatctttactaatggtgacgaactcatcgtatagaactctaagtttgtccattatttatttacagatttagttgtttaatttatttgtgctcttccagagttgggatagtatttttctaacgtcggtattatattattaggatctacgttcatatgtatcataatattaatcatccacgttttgataaatctatctttagcttctgaaataacgtatttaaacaaaggagaaaaatatttagctacggcatcagacgcaataacattttttgtaaatgtaacgtatttagacgacagatcttcgttaaaaagttttccatctatgtagaatccatcagttgttaacaccattcccgcgtcagattgaataggagtttgaatagtttgttttggaaatagatccttcaataacttatagttgggtgggaaaaaatcgattttatcactagactctttcttttttactatcattacctcatgaactatttcttgaatgagtatatgtattttctttcctatatcggacgcgttcattggaaaatataccatgtcgttaactataagaatatttttatcctcgtttacaaactgaataatatcagatgtagttcgtaaacgaactatatcatcaccagcacaacatctaactatatgatatccactagtttcctttagtcgtttattatcttgttccatattagcagtcattccatcatttaagaaggcgtcaaagataatagggagaaatgacattttggattctgttacaactttaccaaaattaaggatatacggacttactatctttttctcaacgtcaatttgatgaacacacgatgaaaatgtacttcgatgagattgatcatgtagaaaacaacaagggatacaatatttccgcatatcatgaaatatattaagaaatcccaccttattatatttccccaaaggatccatgcacgtaaacattatgccgttatcattaataaagacttctttctcatcggatctgtaaaagttgttactgatttttttcattccaggatctagataattaataatgatgggttttctattcttattctttgtattttggcatatcctagaccagtaaacagtttccactttggtaaaatcagcagacttttgaacgctattaaacatggcattaatggcaataactaaaaatgtaaaatatttttctatgttaggaatatggtttttcactttaatagatatatggtttttggccaaaatgatagatatttttttatccgaggatagtaaaatattattagtcgccgtctctataaaaatgaagctagtctcgatatccaattttattctagaattgataggagtcgccaaatgtaccttatacgttatatctcccttgatgcgttccatttgtgtatctatatcggacacaagatctgtaaatagttttacgttattaatcatcacggtatcgccgtcgctagataatgctaatgtaccatccaagtcccaaatggagagatttaactgttcatcgtttagaataaaatgattaccggtcatattaataaagtgttcatcgtatctagataacaacgacttataattaatgtccaagtcttgaactcgctgaatgatcttttttaacccagttagttttagattggtacgaaatatattgttaaactttgattctacagtaatgtccaaatctagttgtggaaatacttccatcaacattgtttcaaacttgataatattattatctacatcttcatacgatccaaattccggaatagatgtatcgcacgctctggccacccagataaccaaaaagtcacacgctccaggatatacattgtataaaaagctatcgtttttaagtagggtttttttctgcgtgtatacgaagggattaaaaatagtattatcaacgtaactatattccaaattattcttatgagaatagataataatatcgtccttaatatctaacaaatttcctaaatatccctttaattgagtcattcgaagcgtcaatagaatatgtctcttaactatttccggctgttgtatatttaaatgacttcgtaaaaaataatatatgggcgacttctcatctatgtaatcatatggagtgagatatagggctcgttctacctcctgccccttacccacctgtaataccaattgcggacttactatatatcgcatatttatatcgtggggtaaagtgaaaatctactaccgatgatgtaagtcttacaatgttcgaaccagtaccagatcttaatttggaggcctccgtagaactaggggaggtaaatatagatcaaacaacacctatgataaaggaaaatagcggttttatatcccgtagtagacgtctattcgcccatagatctaaggatgatgagagaaaactagcactacgattctttttacaaagactttattttttagatcatagagagattcattatttgttcagatgcgttgacgctgtaaaagacgtcactattaccaaaaaaaataacattatcgtggcgccttatatagcacttttaactatcgcatcaaaaggatgcaaacttacagaaacaatgattgaagcattctttccagaactatataatgaacatagtaagaaatttaaattcaactctcaagtatccatcatccaagaaaaactcggataccagtttggaaactatcacgtttatgattttgaaccgtattactctacagtagctctggctattcgagatgaacattcatctggcatttttaatatccgtcaagagagttatctggtaagttcattatctgaaataacatatagattttatctaattaatctaaaatctgatcttgttcaatggagtgctagtacgggcgctgtaattaatcaaatggtaaatactgtattgattacagtgtatgaaaagttacaactggtcatagaaaatgattcacaatttacatgttcattggctgtggaatcagaacttccaataaaattacttaaagatagaaatgaattatttacaaaattcatcaacgagttaaaaaagaccagttcattcaagataagcaaacgcgataaggatacgctactaaaatattttacttaggactggagttagaatttatagacgactcatttcgtttatcattattactaccatcattattagtattcttcttgttatcttgttcagaaatatacagcaatgctatgcctaatactaaatacattatcatgcttgcaatggctctaacaacgacgaaccaaaatgaatttggtcgtagcttttgttcacaaaaatacataaagaaatgtctacataaatctatggcgccattggctacttgaaatagcgccagtcctcctacagattttaatatagctgtataacatgacatttattcatcatcaaaagagacagagtcaccatctgtcatatttagattttttttcatgtgttcaaagtatcctctactcatttcattataatagtttatcatacttagaattttaggacggatcaatgagtaagacttgactagatcgtcagtagtaatttgtgcatcgtctattctgcatccgcttcgtcgaataatgtatagcatcgctttgagattctccatagctatcaagtctttatacaatgacatggaaatatctgtgaatactttatacttctccaacatcgatgccttaacatcatcgcctactttagcattgaaaatacgttctattgtgtagatggatgtagcaagatttttaaacaacaatgccatcttacacgatgattgcctcaagtctccaatcgtttgtttagaacgattagctacagagtccaatgcttggctgactagcatattattatctttagaaattgtattcttcaatgaagcgtttatcatatctgtgatttcgttagtcatattacagtctgactgggttgtaatgttatccaacatatcacctatggatacggtacacgtaccagcatttgtaataatcctatctaagatgttgtatggcattgcgcagaaaatatcttctcctgtaatatctccactctcgataaatctactcagattattcttaaatgccttattctctggagaaaagatatcagtgtccatcatttcattaatagtatacgcagaaaagataccacgagtatcaattctatccaagatacttatcggttccgagtcacagataatggtttcctctccttcgggagatcctgcatagaaatatctaggacaatagtttctatactgtctgtaactctgataatctctaaagtcactaactgataccatgaaattgagaagatcaaacgctgaagtaatcaatttttctgcctcgtttttactacaactagttttcatcaatgtagtgacgatgtattgtttagttactcttggtctaatactgatgatagagatattattgcttcccataatggatcttctagtagtcaccttaaagcccattgatgcgaatagcagatagataaagtcttggtatgactcctttctaatatagtacggactacctttgtcacccaactttatacccacataagccataacaacctctttaatagccgtttcatgaggtttatcagccatgagcctgagtagttggaagaatctcatgaatcctgtctcagaaagtcctatatgcatgatagaagatttatctttcctgggaaactctcgtatagtcatagatgaaatactcttcaaagtttctgaaataagattagtaacagtcttacctccgactactctgggtaacaaacatactctaataggtgttttctctgcggagataatatcagaaaggatagagcaataagtagtattattgtgattataaagaccgaatacataacaggtagaatttataaacatcatgtcctgaaggtttttagacttgtattcctcgtaatccataccgtcccaaaacatggatttggtaactttgatagccgtagatctttgttccttcgccaacaggttaaagaaattaataaagaatttgttgtttctatttatgtccacaaattgcacgtttggaagcgtaactgttacgttcactgcagcattttgaggatcgcgagtatgaagtacgatgttattgtttactggtatatctggaaagaaatctaccagtctaggaataagagattgatatcgcatagaaatagtaaagtttataatctcatcatcgaagagcattttgttaccattgtaataaatatccactctgtcatatgtataaatgaagtactgttcaaacatgatgagatgtttatatgttggcatagtagtgagatcgacgtttggtaatggcaatgtattaagattaactccataatgtctagcagcatctgcgatgttataagtgtcgtcaaagcggggtcgatcttgtgctgttatatattgtctaacacctataagattatcaaaatcttgtctgcttaatacaccgttaacaatttttgccttgaattcttttattggtgcattaataacatccttatagaggatgttaaacaaataagtgttatcaaagttaagatctggatatttcttttctgctagaacatccattgagtcggagccatctggtttaatataaccaccgataaatctagctctgtattctgtatccgtcaatctaatattaagaaggtgttgagtgaaaggtggaagatcgtaaaagctgtgagtattaatgataggattagtttccgaactaatgttaattggggtattaataatatctatatttccagcgttaagtgtaacattaaacagttttaattcacgtgacgtggtatcaattaaataattaatgcccaatttggatatagcagcctgaagctcatcttgtttagttacggatcctaatgagttattaagcaatatatcgaacggatgaacgaaggttgttttaagttggtcacatactttgtaatctagacatagatgcggaagaacggtagaaactatacgaaataaatattcagagtcctctaattgatcaagagtaactattgacttaataggcatcatttatttagtattaaatgacgaccgtaccagtgacggatatacaaaacgatttaattacagagttttcagaagataattatccatctaacaaaaattatgaaataactcttcgtcaaatgtctattctaactcacgttaacaacgtggtagatagagaacataatgccgccgtagtgtcatctccagaggaaatatcctcacaacttaatgaagatctatttccagatgatgattcaccggccactattatcgaacgagtacaacctcatactactattattgacgatactccacctcctacttttcgtagagagttattgatatcggaacaacgtcaacaacgagaaaaaagatttaatattacagtatcgaaaaatgctgaagcaataatggaatctagatctatgataacttctatgccaacacaaacaccatccttgggagtagtttatgataaagataaaagaattcagatgttagaggatgaagtggttaatcttagaaatcaacgatctaatacaaaatcatctgataatttagataattttaccaaaatactatttggtaagactccgtataaatcaacagaagttaataagcgtatagccatcgttaattatgcaaatttgaacgggtcccccttatcagttgaggacttggatgtttgttcggaggatgaaatagatagaatctataaaacgattaaacaatatcacgaaagtagaaaacgaaaaattatcgtcactaacgtgattattattgtcataaacattatcgagcaggcattgctaaaactcggatttgaagaaatcaaaggactgagtaccgatatcacttcagaaattatcgatgtggagatcggagatgactgcgatgctgtagcatctaaactaggaatcggtaacagtccggttcttaatattgtattgtttatactcaagatattcgttaaacgaattaaaattatttaatttaatacattcccatatccagacaacaatcgtctggattaatctgttcctgtcgtctcataccggacgacatattaatctttttattagtaggcatctttttagatggtttctttttcccagcattaactgagtcgatacctagaagatcgtgattgatctctccgaccattccacgaacttctaattggccgtctctaacggtaccataaactattttaccagcattagtaacagcttggacaatctgaccatccattgcgttgaatgatgtagtagtaactgttgttctacgtctaggagcaccagaagtatttttggagcccttggatgttgatgtagaagaagacgaggattttgattttggtttacatgtaatacattttgaactctttgattttgtatcacatgcgccggcagtcacatttgtttgagaattaagattattgttgcctcctttgacggctgcatctccaccgatttgcgctagtagatttttaagctgtggtgtaatcttattaactgtttcgatataatcatcgtaactgcttctaacggctaaattttttttatccgccatttagaagctaaaaatatttttatttatgcagaagatttaactagattatacaatgaactaatatgatccttttccagattatttacaaacttggtattttttggttctggaggaggcgaatttaaattcggacttggattcggattttgtgagttcttgatcttattatacatcgagtataggatggcgacggtaactgctacgcaaataccgatcaacaaaagaataccaatcatttattgacaataacttcactattgatcaagtatgcaatatatcatcttttcactaaataagtagtaataatgattcaacaatgtcgagatatatggacgataataatttagttcatggaaatatcgctatgattggtatgaatgactccgctaactctgtggggcgcgcagtgctttccccacatagaataaattagcattccgactgtgataataataccaagtataaacgccataatactcaatactttccatgtacgagtgggactggtagacttactaaagtcaataaaggcgaaaatacacgaaagaatcaaaagaatgattccagcgattagcacgccggaaaaataatttccaatcataagcatcatgtccatttaactaataaaaattttaaatcgccgaatgaacaaagtggaatataaaccatataaaaacaatagtttgtactgcaaaaataatatctatttttgttttcgaagatatggtaaaattaaatagtagtacacagcatgttataactaacagcagcaacggctcgtaattacttatcatttactagacgaaaaggtggtgggatattttcttgctcaaataatacgaatatatcacccatccattttatgcgatgtttatatactctaatctttaatagatctatagacgacgggtttaccaacaatatagattttatcgattcatctaatttaaacccttccttaaacgtgaatgatctattatctggcataacgatgaccctacctgatgaatcggacaatgtactgggccatgtagaataaattatcaacgaattatcgtctacgaacatttatatcatttgttttaattttaggacgcgaataaatggatataaaatagaaaataacagatattacaaccagtgttatggccgcgcccaaccaggtaggcagttttattttatcttttactacaggttctcctggatgatgtacgtcaccaacggcggacgtagttctagtacaattagacgtaagttctgcttgggaattttttaacgctaaagagttaacgttaatcgtgcacccaacgtatttacatctagttctttgaacatcttgattataatataaccattttctatctctagattcgtcggtgcactcatgtaaccaacataccctaggtcctaaatatttatctccggaattagattttggataattcgcgcaccaacaatttctatttcctttatgatcgttacaaaagacgtataatgccgtatccccaaaagtaaaataatcaggacgaataattctaataaactcagaacaatatctcgcatccatatgtttggagcaaatatcggaataagtagacatagccggtttccgttttgcacgtaaccattctaaacaattggggtttccaggatcgtttctacaaaatccagtcatgaaatcgtcacaatgttctgtcttgtaattattattaaatatttttggacagtgtttggtatttgtcttagaacaacattttgctacgctatcactatcgcccaggagataatccttttttataaaatgacatcgttgcccggatgctatataatcagtagcgtgttttaaatccttaatatattcaggagttacctcgttctgataatagattaatgatccaggacgaaatttgaaagaactacatggttctccatgaattaatacatattgtttagcaaattcaggaactataaaactactacaatgatctatcgacataccatctatcaaacaaaacttgggtttaatttctcccggagatgtttcataatagtacgtataactttcttctgcaaacttaacagctctattatattcaggataattaaaacctaattccatatatttgtctcgtatatctgctattcctggtgctattttgattctattaagagtaacagctgcccccattcttaataatcgtcagtatttaaactgttaaatgttggtatatcaacatctaccttatttcccgcagtataaggtttgttgcaggtatactgttcaggaatggttacatttatacttcttctatagtcctgtctttcgatgttcatcacatatgcaaagaacagaataaacaaaataatgtaagaaataatattaaatatctgtgaattcgtaaatacattgattgccataataattacagcagctacaatacatacaatagacattcccacagtgttgccattacctccacgatacatttgagttactaagcaataggtaataactaagctagtaagaggcaatagaaaagatgagataaatatcatcaatatagagattagaggagggctatatagagccaagacgaacaaaatcaaaccgagtaacgttctaacatcattatttttgaagattcccaaataatcattcattcctccataatcgttttgcatcatacctccatctttaggcataaacgattgctgctgttcctctgtaaataaatctttatcaagcactccagcacccgcagagaagtcgtcaagcatattgtaatatcttaaataactcatttatatattaaaaaatgtcactattaaagatggagtataatctttatgccgaactaaaaaaaatgacttgtggtcaacccctaagtctttttaacgaagacggggatttcgtagaagttgaaccgggatcatcctttaagtttctgatacctaagggattttacgcctctccttccgtaaagacgagtctagtatttgaaacattaacaacgaccgataataaaatcactagtatcaatccaacaaatgcgccaaagttatatcctcttcaacgcaaagtcgtatctgaagtagtttctaatatgaggaaaatgatcgaatcaaaacgtcctctatacatcactcttcacttggcgtgtggatttggtaagactattaccacgtgttatcttatggctacacacggtagaaaaaccgtcatttgcgtacccaataaaatgttaatacatcaatggaagacacaggtagaggcagtcggattggaacataagatatctatagatggagtaagtagtctattaaaggaactaaagactcaaagtccggatgtattaatagtagtcagtagacatctgacaaacgatgccttttgtaaatatatcaataagcattatgatttgttcatcttggatgaatcacatacgtataatctgatgaacaatacagcagttacaagatttttagcgtattatcctccgatgatgtgttattttttaactgctacacctagaccagctaaccgaatttattgtaacagtattattaatattgccaagttatccgatctaaaaaaaactatctatgcggtagatagtttttttgagccatattccacagacaatattagacatatggtaaaacgactagatggaccatctaataaatatcatatatataccgagaagttattatctgtagacgagcctagaaatcaacttattcttaataccctggtagaagaattcaagtcaggaactattaatcgcattttagttattactaaactacgtgaacatatggtattattctacaaacgattattagatcttttcggaccagaggttgtatttataggagacgcccaaaatagacgtactccagatatggtcaaatcaatcaaggaactaaatagatttatattcgtatccaccttattttattccggtactggtttagatattcctagtttggattcgttgttcatttgctcggcagtaatcaacaatatgcaaatagagcaattactagggagggtatgtcgagaaacagaactattagataggacggtatatgtatttcctaacacatccatcaaagaaataaagtacatgataggaaatttcatgcaacgaattattagtctgtctgtagataaactaggatttaaacaagaaagttatcggaaacatcaagaatccgatcccacttctgtatgtacaacatcctccagagaagaacgtgtattaaatagaatatttaactcgcaaaatcgttaagaagtttaagcgacgatccgcatgctgcgcaggccagtgtattacccctcatagtattaatataatccaatgatacttttgtgatgtcggaaatcttaaccaatttagactgacaggcagaacacgtcatgcaatcatcatcgtcatcgataactgtagtcttgggcttctttttgcggctcttcattccggaacgcacattggtgctatccatttaggtagtaaaaaataagtcagaatatgccctatagcacgatcgtgcaaaacctggtatatcgtctctatctttatcacaatatagtgtatcgacatttttattattattgacctcgtttatcttggaacatggaatgggaacatttttgttatcaacggccatctttgccttaattccagatgttgtaaaattataactaaacagtctatcatcgacacaaatgaaattcttgtttagacgtttgtagtttacgtatgcggctcgttcgcgtctcattttttcagatattgcaggtactataatattaaaaataagaatgaaataacataggattaaaaataaagttatcatgacttctagcgctgatttaactaacttaaaagaattacttagtctgtacaaaagtttgaaattttcagattctgcggctatagaaaagtataattctttggtagaatggggaacatctacttactggaaaataggcgtgcaaaaggtagctaatgtcgagacgtcaatatctgattattatgatgaggtaaaaaataaaccgtttaatattgatccgggatattacattttcttaccggtatattttggaagcgtctttatttattcgaagggtaaaaatatggtagaacttggatctggaaactcttttcaaataccagatgatatgcgaagtgcgtgtaacaaagtattagatagtgataacggaatagactttctgagatttgttttgttaaacaatagatggataatggaagatgctatatcaaaatatcagtctccagttaatatatttaaactagctagtgagtacggattaaacatacccaaatatttagaaattgaaatagaggaagacacattatttgacgacgagttatactctattatagaacgctctttcgatgataaatttccaaaaatatccatatcgtatattaagttgggagaacttagacggcaagttgtagactttttcaaattctcgttcatgtatattgagtccatcaaggtagatcgtataggagataatatttttattcctagcgttataacaaaatcaggaaaaaagatattagtaaaagatgtagaccatttaatacgatccaaggttagagaacatacatttgtaaaagtaaaaaagaaaaacacattttccattttatacgactatgatggaaacggaacagaaactagaggagaagtaataaaacgaattatagacactataggacgagactattatgttaacggaaagtatttctctaaggttggtagtgcaggcttaaagcaattgactaataaattagatattaatgagtgcgcaactgtcgatgagttagttgatgagattaataaatccggaactgtaaaacgaaaaataaaaaaccaatcagcatttgatttaagcagagaatgtttgggatatccagaagcggattttataacgttagttaataacatgcggttcaaaatagaaaattgtaaggttgtaaatttcaatattgaaaatactaattgtttaaataacccgagtattgaaactatatatggaaactttaaccagttcgtctcaatctttaatatcgtcaccgatgtcaaaaaaagattattcgagtgaaataatatgcgcctttgatataggtgcaaaaaatcctgccagaactgttttagaagtcaaggataactccgttagggtattggatatatcaaaattagactggagttctgattgggaaaggcgcatagctaaagatttgtcacaatatgaatacactacagttcttctagaacgtcagcctagaaggtcgccgtacgtcaaatttatctattttattaaaggctttttatatcatacatcggctgccaaagttatttgcgtctcgcctgtcatgtctggtaattcatatagagatcgaaaaaagagatcggtcgaagcatttcttgattggatggacacattcggattgcgagactccgttccggatagacgcaaattagacgatgtagcggatagtttcaatttggctatgagatacgtattagataaatggaatactaattatacaccttataataggtgtaaatctagaaattacataaaaaaaatgtaataacgttagtaacgccattatggataatctatttacctttctacatgaaatagaagatagatatgccagaactatttttaactttcatctaataagttgcgatgaaataggagatatatatggtcttatgaaagaacgcatttcctcagaggatatgtttgataatatagtgtataataaagatatacatcatgccattaagaaactagtgtattgcgacatccaacttactaaacacattattaatcagaatacgtatccggtatttaacgattcttcacaagtgaaatgttgtcattatttcgacataaactcagataatagcaatattagctctcgtacagtagagatatttgagagggaaaagtcatctcttgtatcatatattaaaactaccaataagaagagaaaggtcaattacggcgaaataaagaaaactgttcatggaggcactaatgcaaattacttttccggtaaaaagtctgacgagtatctgagcactacagtcaggtccaacattaatcaaccttggatcaaaaccatctctaagagaatgagagtagatatcattaatcactctatagtaacgcgtggaaaaagctctatattacaaactatagaaattatttttactaatagaacatgtgtgaaaatattcaaggattctactatgcacattattctatccaaggacaaggatgaaaaggggtgtatacacatgattgacaaattattctatgtctattataatttatttctgttgttcgaggatatcatccaaaacgagtactttaaagaagtagctaatgttgtaaaccacgtactcacggctacggcattagatgagaaattattcctaattaagaaaatggctgaacacgatgtttatggagttagcaatttcaaaatagggatgtttaacctgacatttattaagtcgttggatcataccgttttcccctctctgttagatgaggatagcaaaataaagttttttaaggggaaaaagctcaatattgtagcattacgatctctggaggattgtataaattacgtgactaaatccgagaatatgatagaaatgatgaaggaaagatcgactattttaaatagcatagatatagaaacggaatcggtagatcgtctaaaagaattgcttctaaaatgaaaaaaaacactgattcagaaatggatcaacgactagggtataagtttttggtgcctgatcctaaagccggagttttttatagaccgttacatttccaatatgtatcgtattctaattttatattgcatcgattgcatgaaatcttgaccgtcaagcggccactcttatcgtttaagaataatacagaacgaattatgatagaaattagcaatgttaaagtgactcctccagattactcacctataatcgcgagtattaaaggtaagagttatgacgcattagccacgttcactgtaaatatctttaaagaggtaatgaccaaagagggtatatccatcactaaaataagtagttatgagggaaaagattctcatttgataaaaattccgctactaataggatacgggaataaaaatccacttgatacagccaagtatcttgttcctaatgtcataggtggagtctttatcaataaacaatctgtcgaaaaagtaggaattaatctagtagaaaagattacaacatggccaaaatttagggttgttaagccaaactcattcactttctcgttttcctccgtatcccctcctaatgtattaccgacaagatatcgccattacaagatatctctggatatatcacaattggaagcgtcgaatatatcatcgacaaagacatttataacggtcaatattgttttgctgtctcaatatttatctagagtgagtctagaattcattagacgtagcttatcatacgatatgcctccagaagttgtctatctagtaaacgcgataatagatagtgctaaacgaattactgaatctattactgactttaatattgatacatacattaatgacctggtggaagctgaacacattaaacaaaaatctcagttaacgatcaacgagttcaaatatgaaatgctgcataactttttacctcatatgaactatacacccgatcaactaaagggattttatatgatatctttactaagaaagtttctctactgtatctaccacacttctagatatccagatagagattcgatggtttgtcatcgtatactaacatacggcaaatattttgagacgttggcacatgatgaattagagaattacataggcaacatccgaaacgatatcatgaacaatcacaagaacagaggcacttacgcggtaaacattcatgtactaacaactcctggacttaatcatgcattttctagtctattgagtggaaagttcaaaaagtcagacggtagttatcgaacacatcctcactattcatggatgcagaatatttctattcctaggagtgttggattttatccggatcaagtaaagatttcaaagatgttttctgtcagaaaataccatccaagtcaatatctttacttttgttcatcagacgttccggaaagaggtcctcaggtaggtttagtatctcaattgtctgtcttgagttccattacaaatatactaacgtctgagtatttggatttggaaaagaaaatttgtgagtatatcagatcatattataaagatgatataagttactttgaaacaggatttccaatcactatagaaaatgctctagtcgcatctcttaatccaaatatgatatgtgattttgtaactgactttagacgtagaaaacggatgggattcttcggtaacttggaggtaggtattactttagttagggatcacatgaatgaaattcgcattaatattggagcgggaagattagtcagaccattcttggttgtggataacggagagctcatgatggatgtgtgtccggagttagaaagcagattagacgatatgacattctctgacattcagaaagagtttccacatgtcatcgaaatggtagatatagaacaatttacttttagtaacgtatgtgaatcggttcaaaaatttagaatgatgtcaaaggatgaaagaaagcaatacgatttatgtgactttcctgccgaatttagagatggatatgtggcatcttcattagtgggaatcaatcacaattctggacccagagctattcttggatgtgctcaagctaaacaagctatctcttgtctgagctcggatatacgaaataaaatagacaatggaattcatttgatgtatccagagaggccaatcgtgattagtaaggctttagaaacttcaaagattgcggctaattgcttcggccaacatgttactatagcattaatgtcgtacaaaggtatcaatcaagaggatggaattatcatcaaaaaacaatttattcagagaggcggtctcgatattgttacagccaagaaacatcaagtagaaattccattggaaaactttaataacaaagaaagagataggtctaacgcctattcaaaattagaaagtaatggattagttagactgaatgctttcttggaatccggagacgctatagcacgaaatatctcatcaagaactcttgaagatgattttgctagagataatcagattagctttgatgtttccgaaaaatataccgatatgtacaaatctcgcgttgaacgagtacaagtagaacttactgacaaagttaaggtacgagtattaaccatgaaagaaagaagacccattctaggagataaatttaccactagaacgagtcaaaagggaacagtcgcgtatatcgcagatgaaacggaacttccatacgacgaaaatggtatcacaccagatgtcattattaattctacatccatcttctctagaaaaactatatctatgttgatagaagttattttaacagccgcatattctgctaagccgtacaacaataagggagaaaaccgacctgtctgttttcctagtagtaacgaaacatccatcgatacatatatgcaattcgctaaacaatgttatgagcattcaaatccgaaattgtctgatgaagaattatcggataaaatcttttgtgaaaagattctctatgatcctgaaacggataagccttatgcatccaaagtattttttggaccaatttattacttgcgtctgaggcatttaactcaggacaaggcaaccgttagatgtagaggtaaaaagacgaagctcattagacaggcgaatgagggacgaaaacgtggaggaggtatcaagttcggagaaatggagagagactgtttaatagcgcatggtgcagccaatactattacagaagttttgaaagattcggaagaagattatcaagatgtgtatgtttgtgaaaattgtggagacatagcagcacaaatcaagggtattaatacatgtcttagatgttcaaaacttaatctctctcctctcttaacaaaaattgataccacacacgtatctaaagtatttcttactcaaatgaacgccagaggcgtaaaagttaaattagatttcgaacgaaggcctccttcgttttataaaccattagataaagttgatctcaaaccgtcttttctggtctaatattgtttagtagatacttatcaacatcatcaagattatcaagattatcaagattatcaagataagctaattcactaaacacattatcgatttcggtatcgttactcgcagaataaagttcgttatgatcctgatattcggaaatctgtggagtttcaggttttggtggatgtgtaacagctacttgagataccgaagtctgatattcagaaagctgtggatgttctggttcggcatccaccgatggtgttacaccactactaattggttcagtaacgtctgtggacgatggaggcaccacttctacaggttctggttctttatcctcagtcatcaacggagctacttcaatgcgaggaaatgtataatttggtaatggtttctcgtgtggatctgaagaagaggtaagatatctactagaaagataccgatcacgttctagttctcttttgtagaacttaactttttctttctcagcatctagttgatattccaacctcttcacgttactacgttcagatttcaattcacgttcgcatgggttacctccgcagtttttacgagcgatttcacgttcagccttcatgcgtctctccctctctctatcgagtttatcagagcagtctttctgaaggcgatcgaactccataaatttctccaacgctttgattgtttccatagatttccgaagttcagcttttaggactgtgattctttttctttcgaattcacagctggatgtacaaccgtttccattaccgccatctctaagtttcttttctagatcggcaacatttcatccccatgccttttacattcctcgagtctactgtcgtcgaaatatcgttccagctccttttcgacatcaataactttagcacgttgtctctcaagctctcttttgtagttatctgattccctggcacgtttaagatcttcatgcaattgagtcagctcttaacacaatctcttgcttcttcgtcatagtacgcgcaatcactgtgagatccattgttaccacgtctacactcggcgagctcgcgtttaagagattcaatttcccgtttgtattggtccatgtttccattgctaccaccattagatttacaggctgctagttgtcgttcgagatcagaaatacgggttttcttggaattgatttcgtcgatgtacttggcatcgaaacacttattaagttctttttccaattctacgattttatttctttcgcgagtcaattccctcctgtagtaactatctgttttgtcagattcacgctctctacgtagactttcttgcaagttactaatttgttccctagcacgtccgagtttagttttatatgctgaatagagttctgattcatcctttgagcagatctctagagatcgttcaagatccctgattctagtctttagcctatttacctcctcggaagatgctccgttaccgttgcgtttacactcgttaagctgtctatcaagatccatgattctatctctaagacgttgcatctctctttccatatcagcattgctttcattattacgtctgcagtcactcaactgtctttcaatatctgagattctatctctaagacgtcgcatctctctctgtttcggcattggtttcattattacgtctacagtcgttcaactgtctttcaagatctgatattctagattggagtctgctaatctctgtagcattttcacggcattcactcagttgtctttcaagatctgagattttagattggagtctgctaatctctgtaagatttcctcctccgctctcgatgcagtcggtcaacttattctctagttctctaatacgcgaacgcagtgcatcaacttcttgcgtgtcttcctggttgcgtgtacattcatcgagtctagattcgagatctctaacgcgtcgtcgttcttcctcaagttctctgcgtactacagaaagcgtgtccctatcttgttgatatttagcaatttctgattctagagtactgattttgcttacgtagttactaatatttgtcttggccttatcaagatcctccttgtatttgtcgcattccttgatatccctacgaagtctggacagttcccattcgacattacgacgtttatcgatttcagctcggagatcgtcatcgcgttgttttagccacatacgactgagttcaagttctcgttgacaagatccatctacttttccattcctaatagtatccagttccttttctagttctgaacgcatttctcgttccctatcaagcgattctctcaattctcggatagtcttcttatcaatttctaataaatctgaaccatcatctgtcccattttgaatatccctgtgttctttgatctcttttgtaagtcggtcgattctttcggttttataaacagaatccctttccaaagtcctaatcttactgagtttatcactaagttctgcattcaattcggtgagttttctcttggcttcttccaactctgttttaaactctccactatttccgcattcttcctcgcatttatctaaccattcaattagtttattaataactagttggtaatcagcgattcctatagccgttcttgtaattgtgggaacataattaggatcttctaatggattgtatggcttgatagcatcatctttatcattattagggggatggacaaccttaattggttggtcctcatctcctccagtagcgtgtggttcttcaataccagtgttagtaataggcttaggcaaatgcttgtcgtacgcgggcacttcctcatccatcaagtatttataatcgggttctacttcagaatattcttttctaagagacgcgacttcgggagttagtagaagaactctgtttctgtatctatcaacgctggaatcaatactcaagttaaggatagcgaatacctcatcgtcatcatccgtatcttctgaaacaccatcatatgacatttcatgaagtctaacgtattgataaatagaatcagatttagtattaaacagatccttaacctttttagtaaacgcatatgtatattttagatctccagatttcataatatgatcacatgccttaaatgtcagtgcttccatgatataatctggaacactaatgggtgacgaaaaagatacagcaccatatgctacgttgataaataaatctgaaccactaagtagataatgattaatgttaaggaagaggaaatattcagtatatagatatgccttagcatcatatcttgtactaaacacgctaaacagtttattgatgtgatcaatttccaacagaataattagagcagcgggaataccaacaaacatattaccacatccgtattttctatgaatatcacatattatgttaaaaaatcttgatagaagagcgaatatctcgtctgacttaatgagacgtagttcagcagcagcataagtcataactgtaaatagaacatactttcctgtagtgttgattctagactccacatcaacaccattattaaaaatagttttatatacatctttaatctgctctccgttaatcgtcgaacgttctagtatacggaaacactttgatttcttatctgtagttaatgacttagtgatatcacgaagaatattacgaattacatttcttgtttttcttgagagacctgattcagaactcaactcatcgttccatagtttttttacctcagtggcgaaatctttggagtgcttggtacatttttcaataaggttcgtgacctccatttattataaaaaattttattcaaaacttaactacaatcgggtaattataaaatcgtagatctcccatgtggtggaatactaccatctatcgcatgtggatggacagtaggtaatggccatgggaacagtaatgtttgcatatttatctttcttgccagtattactgcatattgtcccaatgtttcgatgtgatgttctaacctatcaactgccgctgtatcacaacaatagtgtccgatgaaattaagattatgatccaatgtgtttaatatatgattatcaagtcttatacgatccgcgtcttttttgacaggatcaggttcttctacaggaagaagtttcggcctcttatgatattcatgtctgggaaacggtggtctagggtgaggctccggtatcggagtgggttttggattataatcatcatcgtctatgacatcatcttcgacttcgatatttattttgctatcttgatgatgtcctgtatcagttgcattttcagcactcgactgaatattagcgcattcattgtttattattaccatatttctaaacccaaaatgtatatgttgaacatcactactatcgttgatgagtcttatagcatgaattcgcttatcgttatcgggtttagcttctgtcaccttagcaattccttttttattaaactctacataatcatatccatttctattgtttgttctaatataaacgagtatagcatcattgctaaatttttcaatagtatcgaaaacagaatatcctaaaccatataatatatattcaggaacactcaaactaaatgtccaggattctcctaaatacgtaaactttaatagtgcgaaatcattcaaaaatctaccacttatagatagatagtacataaatgcgtatagtagtctacctatctctttattatgaaaaccggcattacgatcatatatgtcgtgatatacctgtgatccgtttacgttaaaccataaatacatgggtgatcctataaacatgaatttatttctaattctcagagctatagttaattgaccgtgtaatatttgcttacatgcatacttgatacgctcattaataagatttttatcattgctcgttatctcagaatcgtatatataaggagtaccatcgtgattcttaccagatattatacaaaatactatatataaaatatattgaccaacgttagtaatcatataaatgtttaacgttttaaattttgtattcaatgatccattatcatacgctagcatggtcttatgatattcattctttaaaatataatattgtgttagccattgcattggggctcctaatggagattttttattctcatccattttaggataggctttcataaagtccctaataacttcgtgaataatgtttctatgttttctactgatgcatgtatttgcttcgatttttttatcccatgtttcatctatcatagatttaaacgcagtaatgctcgcaacattaacatcttgaaccgttggtacaattccgttccataaatttataatgttcgccatttatataactcattttttgaatatacttttaattaacaaaagagttaagttactcatatggacgccgtccagtctgaacatcaatctttttagccagagatatcatagccgctcttagagtttcagcgtgattttccaacctaaatagaacttcatcgttgcgtttacaacacttttctatttgttcaaactttgttgttacattagtaatctttttttccaaattagttagccgttgtttgagagtttcctcattgtcgtctccatcggctttaacaattgcttcgcgtttagcctctggctttttagcagcctttgtagaaaaaaattcagttgctggaattgcaagatcgtcatctccggggaaaagagttccgtccatttaaagtacagattttagaaactgacactctgcgttatttatatttggtacaacacatggattataaatatcgatgttaataacatcagaaaatgtaaagtctatacattgttgcatcgtgttaaattttctaatggatctagtattattgggtccaacttctgcctgaaatccaaatatggaagcggatacaaaaccgtttcctggataaaccacacatctccacttttgctttacatcagaaattgtgtcattgacatcttgaactctcctatctaatgccggtgttccacctatagattttgaatattcgaatgctgcatgagtagcattaaattccttaatattgccataattttcatatattgagtaaccctggataaaaagtaaacacaccgcagccgtcgctaccacaataaaaaaaattgatagagagttcatttataatctattagaagctgacaaaatttttttacacgcatcagacaatgctttaataaatagttcaacatctacttttgtcatatcgaaccgatggtatgattctaacctagaattacatccgaaaaagttgactatgttcatagtcattaagtcattaacaaacaacattccagactctggattataagacgatactgtttcgtcacaatcacctaccttaatcatgtgattatgaatattggctattagagcaccttctaagaaatctataatatctttgaaacacgatttaaaatcaaaccacgaatatacttctacgaagaaagttagtttacccataggagagataactataaatggagatctagatacaaaatccggatctatgatagttttaacattattatattctctattaaatacctccacatctaaaaatgttaattttgaaactatgtcttcgtttattaccgtacctgaactaaacgctataagctctattgtttgagaactctttaaacgatattcttgaaatacatgtaacaaagtttcctttaactcggtcggtttatctaccatagttacagaatttgtatccttatctataatataataatcaaaatcgtataaagttatataattatcgcgttcagattgtgatcttttcaaatagactaaaaaccccatttctctagtaagtatcttatgtatatgtttgtaaaatatcttcatggtgggaatatgctctaccgcagttagccattcctcattgacagcggtagatgtattagacaaaactattccaatgtttaacaagggccattttacgagattattaaatccttgtttgataaatgtagccaatgagggttcgagttcaacgacgattgaattctcttcccgcggatgctgcatgatgaacgacgggatgttgttcgattgatttggaattctttttcgactttttgtttatattaaatattttaaaatttatagcggatagcaattcatgtaccacggataatgtagacgcgtattgcgcatcgatatctttattattagataaatttatcaataaatgtgagaagtttgcctcgttaaggtcttccatttaaatattatataaacatttgtgtttgtaacttattcgtcttttatggaatagttttttactagtaaagctgcaattacacactttgtccgtaaaacataaatataaacaccagcttttatcaatcgttccaaaaagtcgacggcggacatttttaacatggcatctattttaaatacacttaggtttttggaaaaaacatcattttataattgtaacgattcaataactaaagaaaagattaagattaaacataagggaatgtcatttgtattttataagccaaagcattctaccgttgttaaatacttgtctggaggaggtatatatcatgatgatttggttgtattggggaaggtaacaattaatgatctaaagatgatgctattttacatggatttatcatatcatggagtgacaagtagtggagcaatttacaaattgggatcgtctatcgatagactttctctaaataggactattgttacaaaagttaataattatgatgatacattttttgacgacgatgattgatcgctattgcacaattttgtttttgtactttctaatatagcgtttaggttctttttcatatgagaatattgatttactaaaatatctatgtttaacttttgttctataacgtccttatcagcggtatcggtacatatacgtaattcaccttcacaaaatacggagtcttcgataataatagccaatcgattattggatctagctgtctgtatcatattcaacatgtttaatatatcctttcgtttcccctttacaggcatcgatcgtagcatattttccgcgtctgagatggaaatgttaaaactacaaaaatgcgtaatgttagcccgtcctaatattggtacgtgtctataagtttggcatagtagaataatagacgtgtttaaatgccttccaaagtttaagaattctattagagtattgcattttgatagtttatcgcctacatcatcaaaaataagtaaaaagtgtgctgattttttatgattttgtgcgacagcaatacatttttctatgttacttttagttcgtatcagattatattctagagattcctgactactaacgaaattaatatgatttggccaaatgtatccatcataatctgggttataaacgggtgtaaacaagaatatatgtttatattttttaactagtgtagaaaacagagatagtaaatagatagtttttccagatccagatcctcccgttaaaaccattctaaacggcatttttaataaattttctcttgaaaattgtttttcttggaaacaattcataattatatttacagttactaaattaatttgataataaatcaaaatatggaaaactaaggtcgttagtagggaggagaacaaagaaggcatatcgtgatataaataacatttattatcatgatgacaccagaaaacgacgaagagcagacatctgtgttctccgctactgtttacggagacaaaattcagggaaagaataaacgcaaacgcgtgattggtctatgtattagaatatctatggttatttcactactatctatgattaccatgtcagcgtttctcatagtgcgcctaaatcaatgcatgtctgctaacgaggctgctattactgacgccgctgttgccgttgctgctgcatcatctactcatagaaaggttgcgtctagcactacgcaatatgatcacaaagaaagctgtaatggtttatattaccagggttcttgttatatattacattcagactaccagttattctcggatgctaaagcaaattgcactgcggaatcatcaacactacccaataaatccgatgtcttgattacctggctcattgattatgttgaggatacatggggatctgatggtaatccaattacaaaaactacatccgattatcaagattctgatgtatcacaagaagttagaaagtatttttgtgttaaaacaatgaactaatatttatttttgtacattaataaatgaaatcgcttaatagacaaactgtaagtaggtttaagaagttgtcggtgccggccgctataatgatgatactctcaaccattattagtggcataggaacatttctgcattacaaagaagaactgatgcctagtgcttgcgccaatggatggatacaatacgataaacattgttatctagataccaacattaaaatgtctacagataatgcggtttatcagtgtcgtaaattacgagctagattgcctagacctgatactagacatctgagagtattgtttagtattttttataaagattattgggtaagtttaaaaaagaccaataataaatggttagatattaataatgataaagatatagatattagtaaattaacaaattttaaacaactaaacagtacgacggatgctgaagcgtgttatatatacaagtctggaaaactggttgaaacagtatgtaaaagtactcaatctgtactatgtgttaaaaaattctacaagtgacaacaaaaaatgaattaataataagtcgttaacgtacgccgccatggacgccgcgtttgttattactccaatgggtgtgttgactataacagatacattgtatgatgatctcgatatctcaatcatggactttataggaccatacattataggtaacataaaaactgtccaaatagatgtacgggatataaaatattccgacatgcaaaaatgctactttagctataagggtaaaatagttcctcaggattctaatgatttggctagattcaacatttatagcatttgtgccgcatacagatcaaaaaataccatcatcatcatagcatgcgactatgatatcatgttagatatagaagataaacatcagccattttatctattcccatctattgatgtttttaacgctacaatcatagaagcgtataacctgtatacagctggagattatcatctaatcatcaatccttcagataatctgaaaatgaaattgtcgtttaattcttcattctgcatatcagacggcaatggatggatcataattgatgggaaatgcaatagtaattttttatcataaaagttgtaaagtaaataataaaacaataaatattgaactagtagtacgtatattgagcaatcagaaatgatgctggtacctcttatcacggtgaccgtagttgcgggaacaatattagtatgttatatattatatatttgtaggaaaaagatacgtactgtctataatgacaataaaattatcatgacaaaattaaaaaagataaagagttctaattccagcaaatctagtaaatcaactgatagcgaatcagactgggaggatcactgtagtgctatggaacaaaacaatgacgtagataatatttctaggaatgagatattggacgatgatagcttcgctggtagtttaatatgggataacgaatccaatgttatggcgcctagcacagaacacatttacgatagtgttgctggaagcacgctgctaataaataatgatcgtaatgaacagactatttatcagaacactacagtagtaattaatgaaacggagactgttgaagtacttaatgaagataccaaacagaatcctaactattcatccaatcctttcgtaaattataataaaaccagtatttgtagcaagtcaaatccgttcattacagaactcaacaataaatttagtgagaataatccgtttagacgagcacatagcgatgattatctaaataagcaagaacaagatcatgaacacgatgatatagaatcatcggtcgtatcattggtgtgattagtttcctttttataaaattgaagtaatatttagtattattgctgccgtcacgttgtacaaatggagatattccctgtattcggcatttctaaaattagcaattttattgctaataatgactgtagatattatatagatacagaacatcaaaaaattatatctgatgagatcaatagacagatggatgaaacggtacttcttaccaacatcttaagcgtagaagttgtaaatgacaatgagatgtaccatcttattcctcatagattatcgacgattatactctgtattagttctgtcggaggatgtgttatctctatagataatgacgtcaatggcaaaaatattctaacctttcccattgatcatgctgtaatcatatccccactgagtaaatgtgtcgtagttagcaagggtcctacaaccatactggttgctaaagcggatatacccagcaaacgattggtaacatcgtttacaaacgacatactgtatgtaaacaatctatcactgattaattatttgccgttgtctgtattcattattagacgagtcaccgactatttggatagacacatatgcgatcagatatttgctaataataagtggtattcccttataaccatcgacgataagcaatatcctattccatcaaattgtataggtatgtcttctgccaagtacataaattctagcatcgagcaagatactttaatacatgtttgtaacctcgagcatccattcgacttagtatacaaaaaaatgcagtcgtacaattctgtacctatcaaggaacaaatattgtacggtagaattgataatataaatatgagcattagtatttctgtggattaatagatttctagtatggggatcattaatcatctctaatctctaaatacctcataaaacgaaaaaaaagctattatcaaatactgtacggaatagattcattctcttctctttttatgaaactctgttgtatatctactgataaaactggaagcaaaaaatctgatagaaagaataagaataagatcaagatcaaggattatatggaacacgattattataaaataacaatagttcctggttcctcttccacgtctactagctcgtggtattatacacatgcctagtaatagtctctttgcgttgatggaaagcagactagaaataacaggctaaaatgttcagacaccataatagttcccaacccagataataacagagtaccatcaacacattcctttaaactcaatcccaaacccaaaaccgttaaaatgtatccggccaattgatagtagataatgaggtgtacagcgcatgataatttacacagtaaccaaaatgaaaatactttagtaattataagaaatatagatggtaacgtcatcatcaacaatccaataatatgccggagagtaaacattgacggataaaacaaaaatgctccgcataactctatcatggcaataacacaaccaaatacttgtaagattcctaaattagtagaaaatacaacggatatcgatgtataagtgatctcgagaaataataagaataaagtaatgcccgtaaagataaacatcaacattgtttggtaatcattaaaccaattagtatgacgttgaactaatttcacagtaaattttattccagtgttatcctcgcatgtataagtacctggtaagatatctttatattccataatcaatgagacatcactatctgataacgaatgaagtctagcactagtatgccatttacttaatattgtcgtcttggaagttttattataagttaaaatatcatggttatccaatttccatctaatatactttgtcggattatctatagtacacggaataatgatggtatcattacatgctgtatactctatggtctttgtagttgttataacaaccaacgtatagaggtatatcaacgatattctaactcttgacattttttatttatttaaaatgatacctttgttatttattttattctattttgctaacggtattgaatggcataagtttgaaacgagtgaagaaataatttctacttacttattagacgacgtattatacacgggtgttaatggggcggtatacacattttcaaataataaactaaacaaaactggtttagctaatactaattatatcacaacatctataaaagtagagaatgaggatacattagtatgcggaaccaataacggaaatcccaaatgttggaaaatagacggttcagacgacccaaaacatagaggtagaggatacgctccttatcaaaatagcaaagtaacgataatcagttacaacgaatgtgtactatctgacataaacatatcaaaagaaggaattaaacgatggagaagatttgacggaccatgtggttatgatttattcacggcggataacgtaattccaaaagatggtttacgaggagcattcgtcgataaagacggtacttatgacaaagtttacattcttttcactgatactatcggctcaaagagaattgttaaaattccgtatatagcacaaatgtgcctaaacgacgaaggtggtccatcatcattgtctagtcatagatggtcgacgtttctcaaagtcgaattagaatgtgatatcgacggaagaagttatagacaaattattcattctagaactataaaaacagataatgatacgatactatatgtattcttcgatagtccttattccaagtccgcattatgtacctattctatgaataccattaaacaatctttttctacgtcaaaattggaaggatatacaaagcaattgccgtctccagctcctggtatatgtctaccagctggaaaagttgttccacataccacgtttgaagtcatagaaaaatataatgtactagatgatattataaagcctttatctaaccaacctatcttcgaaggaccgtctggtgttaaatggttcgatataaaggagaaggaaaatgaacatcgggaatatagaatatacttcataaaagaaaattctatatattcgttcgatacaaaatctaaacaaactcgtagctcgcaagtcgatgcgcgactattttcagtaatggtaacttcgaaaccgttatttatagcagatatagggataggagtaggaatgccacaaatgaaaaaaatacttaaaatgtaatcttaatcgagtacaccacacgacaatgaacaaacataagacagattatgctggttatgcttgctgcgtaatatgcggtctaattgttggaattatttttacagcgacactattaaaagttgtagaacgtaaattagttcatacaccatcaatagataaaacgataaaagatgcatatattagagaagattgtcctactgactggataagctataataataaatgtatccatttatctactgatcgaaaaacctgggaggaaggacgtaatgcatgcaaagctctaaatccaaattcggatctaattaagatagagactccaaacgagttaagttttttaagaagcattagacgcggatattgggtaggagaatccgaaatattaaaccagacaaccccatataattttatagctaagaatgccacgaagaatggaactaaaaaacggaaatatatttgtagcacaacgaatactcccaaactgcattcgtgttacactatataacaattacactacatttttatcataccactacttcggttagatgttttagaaaaaaataaatatcgccgtaccgttcttgtttttataaaaataacaattaacaattatcaaattttttctttaatattttacgtggttgaccattcttggtggtaaaataatctcttagtgttggaatggaatgctgtttaatgtttccacactcatcgtatattttgacgtatgtagtcacatcgtttacgcaatagtcagactgtagttctatcatgcttcctacattagaaggaggaacagttttaaagtctcttggttttaatctattaccgttagttttcatgaaatcctttgttttatccacttcacattttaaataaatgtccactatacattcttttgttaattttactagatcgtcatgggtcatagaatttataggttccgtagtccatggatccaaactagcaaacttcgcgtatacggtatcgcgattagtgtatacaccaactgtatgaaaattaagaaaacagtttaataaatcaacagaaatatttaatcctccgtttgatacagatgcgccatatttatggatttcggattcacacgttgtttgtctgaggtgttcgtctagtgttgcttctacgtaaacttcgattcccatatattctttattgtcagaatcgcataccgatttatcatcatacactgtttgaaaactaaatggtatacacatcaaaataataaataataacgagtacattctgcaatattgttatcgtaattggaaaattagtgttcgagtgagtcggattatgtgagtactggattgtatattttattttatattttgtaataagaataaaatgctaatgtcaagtttattccaatagatgtcttattaaaaaacatatataataaataacaatggctgaatggcataaaattatcgaggatatctcaaaaaataataagttcgaggatgccgccatcgttgattacaagactacaaagaatgttctagctgctattcctaacagaacatttgccaagattaatccgggtgaaattattcctctcatcactaatcgtaatattctaaaacctcttattggtcagaaatattgtattgtatatactaactctctaatggatgagaacacgtatgctatggagttgcttactgggtacgcccctgtatctccgatcgttatagcgagaactcataccgcacttatatttttgatgggtaagccaacaacatccagacgtgacgtgtatagaacgtgtagagatcacgctacccgtgtacgcgcaactggtaattaaaataaaaagtaatattcatatgtagtatcaattttaaatgatgatgatgaaatggataatatccatattgacgatgtcaataatgccggtattggcatacagttcatcgatttttagatttcattcagaggatgtggaattatgttatgggcatttgtattttgataggatctataatgtagtaaatataaaatataatccgcatattccatatagatataattttattaatcgcacgttaaccgtagatgaactagacgataatgtcttttttacacatggttattttttaaaacacaaatatggttcacttaatcctagtttgattgtctcattatcaggaaacttaaaatataatgatatacaatgctcagtaaatgtatcgtgtctcattaaaaatttggcaacgagtacatctactatattaacatctaaacataagacttattctctacatcggtccacgtgtattactataataggatacgattctattatatggtataaagatataaatgacaagtataatgacatctatgattttactgcaatatgtatgctaatagcgtctacattgatagtgaccatatacgtgtttaaaaaaataaaaatgaactcttaattatgctatgctattagaaatggataaaatcaaaattacggttgattcaaaaattggtaatgttgttaccatatcgtataacttggaaaagataactattgatgttacacctaaaaagaaaaaagaaaaggatgtattattagcgcaatcagttgctgtcgaagaggcaaaagatgtcaaggtagaagaaaaaaatattatcgatattgaagatgacgatgatatggatgtagaaagcgcataatactatctataaacataagtatataataaatactttttatttacggtactcttgtagtggtgataccctactcaattatttttttaaaaaaatacttattctgattcttctagccatttccgtgttcgttcgaatgccacatcgacgttaaagataggggagtagttgaaatctagttctgcattgttggtacgcacctcaaatgtagtgttggatatcttcaacgtatagttgttgagtagtgatggttttctaaatagaattctcttcatatcattcttgcacgcgtacatttttagcatccatcttggaatcctagatccttgttctattcccaatggtttcatcaatagaagattaaacatatcgtacgaacacgatggagagtaatcgtagcaaaagtaagcatttcctttaatcttagatcccggatactggatatattttgcagccaacacgtgcatccatgcaacatttcctacatatacccggctatgcaccgcgtcatcatcgactgtacgatacataatgttaccgtgttgcttacattgctcgtaaaagactttcgtcaatttgtctccttctccgtaaattccagtgggtcttaggcaacaagtatacaattttgctccattcatgattacggaattattggctttcataaccagttgctcggccatacgtttactttttgcgtatacatgtcctggtgatatatcataaagggtatgctcatggccgatgaatggatcaccgtgtttatttggtcctattgcttccatgctactagtatagatcaaatacttgattcctaggtccacacaagctgccaatatagtctgtgttccataatagtttactttcatgatttcattatcggtgtattttccaaatacatccactagagcagccgtatgaataatcagatttaccccatctagcgcttctctcaccttatcaaagtcgtttatatcacattgtatatagtttataaccttaactttcgaggttattggttgtggatcttctacaatatctatgactctgatttcttgaacatcatctgcactaattaacagttttactatatacctgcctagaaatccggcaccaccagtaaccgcgtacacggccattgctgccactcataatatcagactacttattctattttactaaataatggctgtttgtataatagaccacgataatatcagaggagttatttactttgaaccagtccatggaaaagataaagttttaggatcagttattggattaaaatccggaacgtatagtttgataattcatcgttacggagatattagtcaaggatgtgattccataggcagtccagaaatatttatcggtaacatctttgtaaacagatatggtgtagcatatgtttatttagatacagatgtaaatatatctacaattattggaaaggcgttatctatttcaaaaaatgatcagagattagcgtgtggagttattggtatttcttacataaatgaaaagataatacattttcttacaattaacgagaatggcgtttgatatatcagttaatgcgtctaaaacaataaatgcattagtttacttttctactcagcaaaataaattagtcatacgtaatgaagttaatgatacacactacactgtcgaatttgatagggacaaagtagttgacacgtttatttcatataatagacataatgacaccatagagataagaggggtgcttccagaggaaactaatattggttgcgcggttaatacgccggttagtatgacttacttgtataataagtatagttttaaactgattttagcagaatatataagacacagaaatactatatccggcaatatttattcggcattgatgacactagatgatttggctattaaacagtatggagacattgatctattatttaatgagaaacttaaagtagactccgattcgggactatttgactttgtcaactttgtaaaggatatgatatgttgtgattctagaatagtagtagctctatctagtctagtatctaaacattgggaattgacaaataaaaagtataggtgtatggcattagccgaacatatatctgatagtattccaatatctgagctatctagactacgatacaatctatgtaagtatctacgcgggcacactgagagcatagaggatgaatttgattattttgaagacgatgattcgtctacatgttctgccgtaaccgacagggaaacggatgtataattttttttatagcgtgaaggatatgataaaaaatataattgttgtatttatcccattccaatcaccttatatgattctgtaaaaaaattatactgtaacacaatgaaggagtcttatagatgtatagaggtcagatactggtttgataaactgtttattccacataagtatgtttgactttatggttagacccgcatactttaacaaatcactgaaaattggagttaggtattgacctctcagaatcagttgccgttctggaacattaaatgtattttttatgatatactccaacgcatttatgtgggcatacaacaagtcattactaatggagtattccaagagttttagttgtctagtatttaacaagagaagagatttcaacagactgtttatgaactcgaatgccgcctcattgtcgcttatattgatgatgtcgaattctcccaatatcatcaccgatgagtagctcatcttgttatcgggatccaagttttctaaagatgtcattaaaccctcgatcatgaatggatttatcatcatcgtttttatgttggacatgagcttagtccgtttgtccacatctatagacgacgatttctgaattatttcatatatccctctctttaactccaggaacttgtcaggatggtctactttaatatgttctcgtctaagagatgaaaatctttggatggttgcacgcgacttttctctaaaggatgacgttgcccaagatcctctcttaaatgaatccatcttatccttggacaagatggacagtctattttccttagatggtttaatatttttgttacccatgatctataaaggtagacctaatcgtctcggatgaccatatatttattttcagttttattatacgcataaattgtaaaaaatatgttaggtttacaaaaatgtctcgtggggcattaatcgtttttgaaggattggacaaatctggaaaaacaacacaatgtatgaacatcatggaatcaataccttcaaacacaataaaataccttaactttcctcagagatccactgtcactggaaagatgatagatgactatctaactcgtaaaaaaacctataatgatcatatagttaatctattattttgtgcaaatagatgggagtttgcatcttttatacaagaacaactagaacagggaattactttaatagttgatagatacgcattttctggagtagcgtatgccgccgctaaaggcgcgtcaatgactctcagtaagagttatgaatctggattgcctaaacccgacttagttatattcttggaatctggtagcaaagaaattaatagaaacgtcggcgaggaaatttatgaagatgttacattccaacaaaaggtattacaagaatataaaaaaatgattgaagaaggagatattcattggcaaattatttcttctgaattcgaggaagatgtaaagaaggagttgattaagaatatagttatagaggctatacacacggttactggaccagtggggcaactgtggatgtaatagtgaaattacattttttataaatagatgttagtacagtgttataaatggatgaagcatattactctggcaacttggaatcagtactcggatacgtgtccgatatgcataccgaactcgcatcaatatctcaattagttattgccaagatagaaactatagataatgatatattaaacaaggacattgtaaattttatcatgtgtagatcaaacttggataatccatttatctctttcctagatactgtatatactattatagatcaagagatctatcagactgagttgattaattcattagacgacaatgaaattatcgattgtatagttaataagtttatgagcttttataaggataacctagaaaatatagtagatgctatcatcactctaaaatatataatgaataatccagattttaaaactacgtatgcagaagtactcggttccagaatagcggatatagatattaaacaagtgatacgtgagaatatactacaattgtctaatgatatccgcgaacgatatttgtgaaaaatattaaaaaaaaatactttttttattaaatgacgtcgcttcgcgaatttagaaaattatgctgtgatatatatcacgcatcaggatataaagaaaaatctaaattaattagagactttataacagatagggatgataaatatttgatcattaagctattgcttcccggattagacgatagaatttataacatgaacgataaacaaattataaaattatatagtataatatttaaacaatctcaggaagatatgctacaagatttaggatacggatatataggagacactattaggactttcttcaaagagaacacagaaatccgtccacgagataaaagcattttaactttagaagaagtggatagttttttaactacgttatcatccgtaactaaagaatcgcatcaaataaaattattgactgatatcgcatccgtttgtacatgtaatgatttaaaatgtgtagtcatgcttattgataaagatctaaaaattaaagcgggtcctcggtacgtacttaacgctattagtcctaatgcctatgatgtgtttagaaaatctaataacttgaaagagataatagaaaattcatctaaacaaaatctagactctatatctatttctgttatgactccaattaatcccatgttagcggaatcgtgtgattctgtcaataaggcgtttaaaaaatttccatcaggaatgtttgcggaagttaaatacgatggtgaaagagtacaagttcataaaaataataacgagtttgccttctttagtagaaacatgaaaccagtactctctcataaagtggattatctcaaagaatacataccgaaagcatttaaaaaagctacgtctatcgtattggattctgaaattgttcttgtagacgaacataatgtaccgctcccgtttggaagtttaggaatacacaaaaagaaagaatataaaaactctaacatgtgtttgttcgtgtttgactgtttgtactttgatggattcgatatgacggacattccattgtacgaacgaagatcttttctcaaagatgttatggttgaaatacccaatagaatagtattctcagagttgacgaatattagtaacgagtctcagttaactgacgtattggatgatgcactaacgagaaaattagaaggattggtcttaaaagatattaatggagtatacgaaccgggaaagagaagatggttaaaaataaagcgagactatttgaacgagggttccatggcagattctgccgatttagtagtactaggtgcttactatggtaaaggagcaaagggtggtatcatggcagtctttctaatgggttgttacgacgatgaatccggtaaatggaagacggtaactaaatgttccggtcacgatgataatacgttaagggagttgcaagaccaattaacgatgattaaaattaacaaggatcccaaaaaaattccagagtggttagtagttaataaaatctatattcccgattttgtagtagaggatccgaaacaatctcagatatgggaaatttcaggagcagagtttacatcttccaagtcacatacagcgaatggaatatcgattagatttcctagatttactaggattagagaagataaaacgtggaaagaatctactcatctaaacgatttagtaaacttgactaaatcttaatagttacatacaaattaaaataacactatttagttggtggtcgccatggatggtgttattgtatactgtctaaacgcgctagtaaaacatggcgaggaaataaatcatataaaaaatgatttcatgattaaaccatgttgtgaaagagtttgtgaaaaagttaagaacgttcacatcgacggacaatctaaaaacaatacagtgattgcagatttgccatatctggataatgctgtatcggatgtatgcaaatcgatatatatatatatatagtatcaagaatatccagatttgctaatttgataaagatagatgacgatgacaagactcctactggtgtatataattattttaaacctaaagatgccattcctgttattatatccataggaaaggatagagatgtttgtgaactattaatctcatctgataaagcgtgtgcgtgtatagagttaaattcatatcacgtagccattcttcccatgaatgtttccttttttaccaaaggaaatgcctcgttgattattctcctgtttgatttctctatcgatgcagcacctctcttaagaagtgtaaccgataataatgttattatatctagacactagcgtctacatgacgagcttccgagttccaattggttcaagttttacataagtataaagtccgactattgttctatattatatatggttgttgatggatctgtgatgcatgcgatagctgataatagaacttacgcaaatattagcaaaaatatattagacaatactacaattaacgatgagtgtagatgctgttattttgaaccacagattaggattcttgatagagatgagatgctcaatggatcatcgtgtgatatgaacagacattgtattatgatgaatttacctgatgtaggcaaatttggatctagtatgttggggaaatatgaacctgacatgattaagattgctctttcggtggctggtaatttaataagaaatcgagactacattcccgggagacgaggatatagctactacgtttacggtatagcctctagataatttttttaagcacgaaataaaaaacataattttaaaccaatctatttcatactattttgtgtgatcaccatggacataaagatagatattagtatttctggtgataaatttacggtgactactaggagggaaaatgaagaaagaaaaaaatatctacctctccaaaaagaaaaaactactgatgttatcaaacctgattatcttgagtacgatgacttgttagatagagatgagatgtctactattctagaggaatattttatgtacagaggtctattaggcctcagaataaaatatggacgactctttaacgaaattaaaaaattcgacaatgatgcggaagaacaattcggtactatagaagaactcaagcagaaacttagattaaattctgaagagggagcagataactttatagattatataaaggtacaaaaacaggatatcgtcaaacttactgtatacgattgcatatctatgataggattgtgtgcatgcgtggtagatgtttggagaaatgagaaactgttttctagatggaaatattgtttacgagctattaaactgtttattaatgatcacatgcttgataagataaaatctatactgcagaatagactagtatatgtggaaatgtcatagaaagttaatgagagcaaaaatatataaggttgtattccatatttgttattttttctgtaatagttaaaaaaatacattcgatggtctatctatcagattattatgtgttataaggtactttttctcataataaactagagtatgagtaagatagtgtttttcaaaacatataaatctaaaattgatggatgagatatacagctattaatttcgaaaatatataaatctaaaattgatggataagatatacagctattaatttcgaaaatatattttaatctgataactttaaacatggatttttgatggtggtttaacgttttaaaaaaagattttgttattgtagtatatgataatattaaaagatggatataaagaatttgctgactgcatgtactattttttacattactacattggctacggcagatatacctactccgccaccacacgctccggtaaacgggtcatgtgacaagggagaatatcttgataagaggcataatcaatgttgtaatcggtgtccacctggagaatttgccaaggttagatgtagtggtagtgataacacaaaatgtgaacgctgcccacctcatacatataccacaatcccaattattctaatggatgtcatcaatgtagaaaatgcccaacaggatcatttgataaggtaaagtgtaccggaacacagaacagtaaatgttcgtgtcttcctggttggtattgcgctactgattcttcacagactgaagattgttgaaattgtgtaccaaaaaggagatgtccatgcggatactttggtggaatagatgaacaaggaaatcctatttgtaaatcgtgctgtattggtgaatattgcaactacctacgtaattatagacttgatccattttctccatgcaaactatctaaatgtaattaattatgattttgatgataatgttaccatacattatatcgctacttggttagtgtattattcagtatgaagacctattaataattacttatcttttgacgatcttgttataattataatataaaaacttatggcatagtaacttataattgctaacacgataaattcgtaataatctgttttgttcaaaggaatctacaggcataaaaataaaaatataatttataatatactcttacagcgcgccatcatgaataacagcagtgaattgattgctgttattaatggatttagaaatagtggacgattttgtgatattagtatagttattaatgatgaaatgataaacgctcacagactcatcctatctggagcctccgaatatttttccattctgttttccaataattttatcgattctaatgaatacgaagttaatctaagtcatttagattatcaaagtgttaacgatttgatcgattacatttatgggatacctttgagcctaactaacgataacgtgaaatatattctttcaaccgctgattttttacaaattggatctgccattactgagtgcgaaaaatacatacttaaaaatctttgttctagaaactgtatcgatttctacatatacgctgataaatataataacaagaaaatagaatcagcgtcgtttaacacaatattacaaaatattttgaaactcatcaacgatgaaaactttaaatacttaacagaggaatcaatgataaaaattttaagcgatgatatgttaaatataaaaaatgaggatttcgccccactaattctcattaaatggttagagagtactcaacaatcatgcaccgtcgagttacttagatgcctcagaatatcattgctttccccacaagttataaaatcactttatagtcatcaactggttagttcaatctacgaatgtataacattcttaaacaatatagcattcttggatgaatcatttcctagataccatagcatcgagttgatatctatcggtataagtaattcgcatgataagatttccataaactgctacaatcataaaaaaaatacatgggaaatgatatcttcacgtagatataggtgtagtttcgcagtggccgtcctggataatattatttatatgatgggtggatatgatcagtccccgtatagaagttcaaaggttatagcgtacaatacatgtacaaattcttggatatatgatataccagagctaaaatatcctcgttctaattgtgggggactggctgatgacgaatacatttattgtataggcggcatacgcgatcaggattcatcgttgacatctagtattgataaatggaagccatcaaaaccatattggcagaagtatgctaaaatgcgcgaaccaaaatgtgatatgggggttgcgatgttaaacggattaatatatgtcatgggtggaatcgttaaaggtgacacgtgtaccgacgcactagagagtttatcagaagatggatggatgaagcatcaacgtcttccaataaaaatgtccaatatgtcgacgattgttcatgatggcaagatttatatatctggaggttacaacaatagtagtgtagttaatgtaatatcgaatctagtccttagctataatccgatatatgatgaatggaccaaattatcatcattaaacattcctagaattaatcccgctctatggtcagcgcataataaattatatgtaggaggaggaatatctgatgatgttcgaactaatacatctgaaacatacgataaagaaaaagattgttggacattggataatggtcacgtgttaccacgcaattatataatgtataaatgcgaaccgattaaacataaatatccattggaaaaaacacagtacacgaatgattttctaaagtatttggaaagttttataggtagttgatagaacaaaatacataattttgtaaaaataaatcactttttatactaatatgacacgattaccaatacttttgttactaatatcattagtatactctacaccttctcctcagacatctaaaaaataggtgatgatgcaactctatcatgtaatcgaaataatacaaatgactacgttgttatgagtgcttggtataaggagcccaattccattattcttttagctgctaaaagcgacgtcttgtattttgataattataccaaggataaaatatcttacgactctccatacgatgatctagttacaactatcacaattaaatcattgactgctagagatgccggtacttatgtatgtgcattctttatgacatcgcctacaaatgacactgataaagtagattatgaagaatactccacagagttgattgtaaatacagatagtgaatcgactatagacataatactatctggatctacacattcaccagaaactagttctgagaaaccagaggatatagataattttaattgctcgtcggtattcgaaatcgcgactccggaaccaattactgataatgtagaagatcatacagacaccgtcacatacactagtgatagcattaatacagtaagtgcaacatctggagaatccacaacagacgagactccggaaccaattactgataaagaagatcatacagttacagacactgtctcatacactacagtaagtacatcatctggaattgtcactactaaatcaaccaccgatgatgcggatctttatgatacgtacaatgatacagtaccatcaactactgtaggtagtagtacaacctctattagtaattataaaaccaaggactttgtagaaatatttggtattaccgcattaattatattgtcggccgtggcaatattctgtattacgtattatatatgtaataaacgttcacgtaaatacaaaacagagaacaaagtctagatttttgacttacataaatgtctgggatagtaaaatctatcatattgagcggaccatctggtttaggaaagacagccatagccaaaagactatgggaatatatttggatttgtggtgtcccataccactagatttcctcgtcctatggaacgagaaggtgtcgattaccattacgttaacagagaggccatctggaagggaatagccgccggaaactttctagaacatactgagtttttaggaaatatttacggaacttctaaaactgctgtgaatacagcggctattaataatcgtatttgtgtgatggatctaaacatcgatggcgttagaagtcttaaaaatacgtacctaatgccttactcggtgtatataagacctacctctcttaaaatggttgagaccaagcttcgtcgtagaaacactgaagcggatgatgagattcatcgtcgtgtgatgttggcaaaaactgacatggatgaggcaggtgaagccggtctattcgacactattatcattgaagatgatgtgaatttagcatatagtaagttaattcagatactacaggaccgtattagaatgtattttaacactaattaaagacttaagacttaaaacttgataattaataatataactcgtttttatatgtggctatttcaacgtctaatgtattagttaaatattaaaacttaccacgtaaaacttaaaatttaaaatgatatttcattgacagatagatcacacattatgaactttcaaggacttgtgttaactgacaattgcaaaaatcaatgggtcgttggaccattaataggaaaaggtggattcggtagtatttatactactaatgacaataattatgtagtaaaaatagagcccaaagctaacggatcattatttaccgaacaggcattttatactagagtacttaaaccatccgttatcgaagaatggaaaaaatctcacaatataaagcacgtaggtcttatcacgtgcaaggcatttggtctatacaaatccattaatgtggaatatagattcttggtaattaatagattaggtgcagatctagatgcggtgatcagagccaataataatagattaccaaaaaggtcggtgatgttgatcggaatcgaaatcttaaataccatacaatttatgcacgagcaaggatattctcacggagatattaaagcgagtaatatagtcttggatcaaatagataagaataaattatatctagtggattacggattggtttctaaattcatgtctaatggcgaacatgttccatttataagaaatccaaataaaatggataacggtactctagaatttacacctatagattcgcataaaggatacgttgtatctagacgtggagatctagaaacacttggatattgtatgattagatggttgggaggtatcttgccatggactaagatatctgaaacaaagaattgtgcattagtaagtgccacaaaacagaaatatgttaacaatactgcgactttgttaatgaccagtttgcaatatgcacctagagaattgctgcaatatattaccatggtaaactctttgacatattttgaggaacccaattacgacgagtttcggcacatattaatgcagggtgtatattattaagtgtggtgtttggttgatgtaaaatttttgttgataaaaattaaaaaaataacttaatttattattgatctcgtgtgtacaaccgaaatcatggcgatgttttacgcacacgctctcggtgggtacgacgagaatcttcatgcctttcctggaatatcatcgactgttgccaatgatgtcaggaaatattctgttgtgtcagtttataataacaagtatgacattgtaaaagacaaatatatgtggtgttacagtcaggtgaacaagagatatattggagcactgctgcctatgtttgagtgcaatgaatatctacaaattggagatccgatccatgatcaagaaggaaatcaaatttctatcatcacataccgccacaaaaactactatgctctaagcggaatcgggtacgagagtctagacttgtgtttggaaggagtagggattcatcatcacacacttgaagcaggaaacgctgtatatggaaaagttcaacatgattattctactatcaaagagaaggccaaagaaatgagtacacttagtccaggacctataattgattaccacgtctggataggagattgtatctgtcaagttactgctgtggacgtacatggaaaggaaattatgagaatgagattcaaaaagggtgcggtgcttccgatcccaaatctggtaaaagttaaacttggggagaatgatacagaaaatctttcttctactatatcggcggcaccatcgaggtaaccacctctctggaagacagcgtgaataatgtactcatgaaacgtttggaaactatacgccatatgtggtctgttgtatatgatcattttgatattgtgaatggtaaagaatgctgttatgtgcatacgcatttgtctaatcaaaatcttataccgagtactgtaaaaacaaatttgtacatgaagactatgggatcatgcattcaaatggattccatggaagctctagagtatcttagcgaactgaaggaatcaggtggatggagtcccagaccagaaatgcaggaatttgaatatccagatggagtggaagacactgaatcaattgagagattggtagaggagttcttcaatagatcagaacttcaggctggtaaattagtcaaatttggtaattctattaattgttaaacatacatctgtttcagctaagcaactaagaacacgtatacggcagcagcttccttttatactctcatcttttaccaacacaaagggtggatatttgttcattggagttgataataatacacacaaagtatttggattcacggtgggttacgactacctcagactgatagagaatgatatagaaaagcatatcaaaagactttgtgttgtgcatttctgtgagaagaaagaggacatcaagtacacgtgtcgattcatcaaggtatataaacctggggatgaggctacctcgacatacgtgtgcgctatcaaagtggaaagatgctgttgtgctgtgtttgcagattggccagaatcatggtatatggatactaatggtatcaataagtattctccagatgaatgggtgtcacatataaaattttaattaatgtaatagagaacaaataataaggttgtaatatcatatagacaataactaacaattaattagtaactgttatctcttttttaactaaccaactaactatatacctattaatacatcgtaattatagttcttaacatctattaatcattaattcgcttctttaattttttataaactaacattgttaattgaaaagggataacatgttacagaatataaattatatatggatttttttaaaaaggaaatacttgactggagtatatatttatctcttcattatatagcacgcgtgtgttccaatttttccacatcccatataatacaggattataatctcgttcgaacatacgagaaagtggataaaacaatagttgattttttatctaggttgccaaatttattccatattttagaatatggggaaaatattctacatatttattctatggatgatgctaatacgaatattataattttttttctagatagagtattaaatattaataagaacgggtcatttatacacaatctcaggttatcatcatccattaatataaaagaatatgtatatcaattagttaataatgatcatccagataataggataagactaatgcttgaaaatggacgtagaacaagacattttttgtcctatatatcagatacagttaatatctatatatgtattttaataaatcatggattttatatagatgccgaagacagttacggttgtacattattacatagatgtatatatcactataagaaatcagaatcagaatcatacaatgaattaattaagatattgttaaataatggatcagatgtagataaaaaagatacgtacggaaacacaccttttatcctattatgtaaacacgatatcaacaacgtggaattgtttgagatatgtttagagaatgctaatatagactctgtagactttaatagatatacacctcttcattatgtctcatgtcgtaataaatatgattttgtaaagttattaatttctaaaggagcaaatgttaatgcgcgtaataaattcggaactactccattttattgtggaattatacacggtatctcgcttataaaactatatttggaatcagacacagagttagaaatagataatgaacatatagttcgtcatttaataatttttgatgctgttgaatctttagattatctattatccagaggagttattgatattaactatcgtactatatacaacgaaacatctatttacgacgctgtcagttataatgcgtataatacgttggtctatctattaaacagaaatggtgattttgagacgattactactagtggatgtacatgtatttcggaagcagtcgcaaacaacaacaaaataataatggaagtactattgtctaaacgaccatctttgaaaattatgatacagtctatgatagcaattactaaaaataaacaacataatgcagatttattgaaaatgtgtataaaatatactgcgtgtatgaccgattatgatactcttatagatgtacaatcactacagcaatataaatggtatattttaagatgtttcgatgaaatagatatcatgaagagatgttatataaaaaataaaactgtattccaattagttttttgtatcaaagacattaatactttaatgagatatggtaaacatccttctttcgtgaagtgcactagtctcgacgtatacggaagtcgtgtacgtaatatcatagcatctattagatatcgtcagagattaattagtctattatccaagaagctggatcctggagataaatggtcgtgttttcctaacgaaataaaatataaaatattggaaaactttaacgataacgaactgtccacatatctaaaaatcttataaacattattaaaatataaaatctaagtggataaaatcacactacatcattgtttccttttagtgctcgacagtgtatactattttttaacgctcataaataaaaatgaaaacgatttccgttgttacgttgttatgcgtactacctgctgttgtttattcaacatgtactgtacccactatgaataacgctaaattaacgtctaccgaaacatcgtttaataataaccagaaagttacgtttacatgtgatcagggatatcattcttcggatccaaatgctgtctgtgaaacagataaatggaaatacgaaaatccatgcaaaaaaatgtgcacagtttctgattacatctctgaactatataataaaccgctatacgaagtgaattccaccatgacactaagttgcaacggcgaaacaaaatattttcgttgcgaagaaaaaaatggaaatacttcttggaatgatactgttacgtgtcctaatgcggaatgtcaacctcttcaattagaacacggatcgtgtcaaccagttaaagaaaaatactcatttggggaatatatgactatcaactgtgatgttggatatgaggttattggtgcttcgtacataagttgtacagctaattcttggaatgttattccatcatgtcaacaaaaatgtgatataccgtctctatctaatggattaatttccggatctacattttctatcggtggcgttatacatcttagttgtaaaagtggttttatactaacgggatctccatcatccacatgtatcgacggtaaatggaatcccgtactcccaatatgtgtacgaactaacgaagaatttgatccagtggatgatggtcccgacgatgagacagatctgagcaaactctcgaaagacgttgtacaatatgaacaagaaatagaatcgttagaagcaacttatcatataatcatagtggcgttaacaattatgggcgtcatatttttaatctccgttatagtattagtttgttcctgtgacaaaaataatgaccaatataagttccataaattgctaccgtgaatataaatccgttaaaataatgaataattaataattaataattaataacgaacaagtatcaaaagattaaagacttatagctagaatcaattgagatgtcttcttcagtggatgttgatatctacgatgccgttagagcatttttactcaggcactattataacaagagatttattgtgtatggaagaagtaacgccatattacataatatatacaggctatttacaagatgcgccgttataccgttcgatgatatagtacgtactatgccaaatgaatcacgtgttaaacaatgggtgatggatacacttaatggtataatgatgaatgaacgcgatattactgtatgtgtgggcaccggactacgattcatggaaatgtttttcgattacaataaaaatagtatcaacaatcaactaatgtatgatataattaatagcgtatctataattctagctaatgagagatatagaagcgcttttaacgacgatggtatatacatccgtagaaatatgattaacaagttgtacggatacgcatctctaactactattggcacgatcgctggaggtgtttgttattatctgttgatgcatctagttagtttgtataaataattatttcaatatactagttaaaattttaagattttaaatgtataaaaaactaataacgtttttatttgtaataggtgcattagcatcctattcgaataatgagtacactccgtttaataaactgagtgtaaaactctatatagatggagtagataatatagaaaattcatatactgatgataataatgaattggtgttaaattttaaagagtacacaatttctattattacagagtcatgcgacgtcggatttgattccatagatatagatgttataaacgactataaaattattgatatgtataccattgactcgtctactattcaacgcagaggtcacacgtgtagaatatctaccaaattatcatgccattatgataagtacccttatattcacaaatatgatggtgatgagcaacaatattctattactgcagagggaaaatgctataaaggaataaaatatgaaataagtatgatcaacgatgatactctattgagaaaacatactcttaaaattggatctacttatatatttgatcgtcatggacatagtaatacatattattcaaaatatgatttttaaaaatttaaaatatattatcacttcagtgacagtagtcaaataacaaacaacaccatgagatatattataattctcgcagttttgttcattaatagtatacatgctaaaataactagttataagtttgaatccgtcaattttgattccaaaattgaatggactggggatggtctatacaatatatcccttaaaaattatggcatcaagacgtggcaaacaatgtatacaaatgtaccagaaggaacatacgacatatccgcatttccaaagaatgatttcgtatctttctgggttaaatttgaacaaggcgattataaagtggaagagtattgtacgggactatgcgtcgaagtaaaaattggaccaccgactgtaacattaactgaatacgacgaccatatcaatttgtacatcgagcatccgtatgctactagaggtagcaaaaagattcctatttacaaacgcggtgacatgtgtgatatctacttgttgtatacggctaacttcacattcggagattctaaagaaccagtaccatatgatatcgatgactacgattgcacgtctacaggttgcagcatagactttgtcacaacagaaaaagtgtgcgtgacagcacagggagccacagaagggtttctcgaaaaaattactccatggagttcgaaagtatgtctgacacctaaaaagagtgtatatacatgcgcaattagatccaaagaagatgttcccaatttcaaggacaaaatggccagagttatcaagagaaaatttaataaacagtctcaatcttatttaactaaatttctcggtagcacatcaaatgatgttaccacttttcttagcatgcttaacttgactaaatattcataactaatttttattaatgatacaaaaatgaaataaaactgcatattatacactggttaacgcccttataggctctaaccattttcaagatgaggtccctgatatagtccttctgttcccctctatcatctactccatgtctattagacgatgtgagaagactgaagaggaaacatggggattgaaaatagggttgtgtataattgccaaagatttctatcccgaaagaactgattgcagtgttcatctcccaactgcaagtgaaggattgataactgaaggcaatggattcagggatatacgaaacaccgataaattataaaaaaagcaatgtgtccgctgtttccgttaataatactattttcgtaactggcggattattcataaataactctaatagcacgatcgtggttaacaatatggaaaaacttgacatttataaagacaaacaatggtcgattatagaaatgcctatggctagggtatatcacggcatcgactcgacatttggaatgttatattttgccggaggtctatccgttaccgaacaatatggtaatttagagaaaaacaacgagatatcttgttacaatcctagaacgaataagtggtttgatatttcatatactatttataagatatccatatcatcattgtgtaaactaaataacgtcttctatgtatttagtaaggacattggatatgtggaaaagtatgatggtgcatggaagttagtacatgatcgtctccccgctataaaggcattatcaacttctccttattgattgaaaatgaaaatataaatagtttttatgtatagcagtattaccctatagttttattgcttactactaacatggatacagatgttacaaatgtagaagatatcataaatgaaatagatagagagaaagaagaaatactaaaaaatgtagaaattgaaaataataaaaacattaacaagaatcatcccaatgaatatattagagaagcactcgttattaataccagtagtaatagtgattccattgataaagaagttatagaatgtatctgtcacgatgtaggaatatagatcatatctactaatttttataatcaatacaaaacataaaaaacaactcgttattacatagcaggcatggaatccttcaagtattgttttgataacgatggcaagaaatggattatcggaaatactttatattctggtaattcaatactatataaggtcagaaaaaatttcactagttcgttctacaattacgtaatgaagatagatcacaaatcacacaagccattgttgtctgaaatacgattctatatatctgtattggatcctttgactatcgacaactggacacgggaacgtggtataaagtatttggctattccagatctgtatggaattggagaaaccgatgattatatgttcttcgttataaagaatttgggaagagtattcgccccaaaggatactgaatcagtcttcgaagcatgtgtcactatgataaacacgttagagtttatacactctcaaggatttacccatggaaaaatagaaccgaggaatatactgattagaaataaacgtctttcactaattgactattctagaactaacaaactatacaagagtggaaactcacatatagattacaacgaggacatgataacttcaggaaatatcaattatatgtgtgtagacaatcatcttggagcaacagtttcaaaacgaggagatttagaaatgttgggatattgcatgatagaatggttcggtggcaaacttccatggaaaaacgaaagtagtataaaagtaataaaacaaaaaaaagaatataaaaaatttatagctactttctttgaggactgttttcctgaaggaaatgaacctctggaattagttagatatatagaattagtatacacgttagattattctcaaactcctaattatgacagactacgtaaactgtttatacaagattgaaattatattcttttttttatagagtgtggtagtgttacggatatctaatatttaatattagactatctctatcgcgctacacgaccaatatcgattactatggatatcttcagggaaatcgcatcttctatgaaaggagagaatgtattcatttctccagcgtcaatctcgtcagtattgacaatactgtattatggagctaatggatcaactgctgaacagctatcgaaatatgtagaaaaggaggagaacatggataaggttagcgctcaaaatatctcattcaaatccataaataaagtatatgggcgatattctgccgtgtttaaagattcctttttgagaaaaattggcgataagtttcaaactgttgacttcactgattgtcgcactatagatgcaatcaacaagtgtgtagatatctttactgaggggaaaatcaatccactattggatgaacaattgtctcctgatacctgtctcctagcaattagtgccgtatactttaaagcaaaatggttgacgccattcgaaaaggaatttaccagtgattatcccttttacgtatctccgacggaaatggtagatgtaagtatgatgtctatgtacggcaaggcatttaatcacgcatctgtaaaggaatcattcggcaacttttcaatcatagaactgccatatgttggagatactagtatgatggtcattcttccagacaagattgatggattagaatccatagaacaaaatctaacagatacaaattttaagaaatggtgtaactctctggaagctacgtttatcgatgttcacattcccaagtttaaggtaacaggctcgtataatctggtggatactctagtaaagtcaggactgacagaggtgttcggttcaactggagattatagcaatatgtgtaatttagatgtgagtgtcgacgctatgatccacaaaacgtatatagatgtcaatgaagagtatacagaagcagctgcagcaacttctgtactagtggcagactgtgcatcaacagttacaaatgagttctgtgcagatcatccgttcatctatgtgattaggcatgttgatggcaaaattcttttcgttggtagatattgctctccaacaactaattgttaaccattttttttaaaaaaaatagaaaaaacatgtggtattagtgcaggtcgttgttcttccaattgcaattggtaagatgacggccaactttagtacccacgtcttttcaccacagcactgtggatgtgacagactgaccagtattgatgacgtcaaacaatgtttgactgaatatatttattggtcgtcctatgcataccgcaacaggcaatgcgctggacaattgtattccacactcctctcttttagagatgatgcggaatcagtgttcatcgacattcgcgagctggtaaaaaatatgccgtgggatgatgtcaaagattgtacagaaatcatccgttgttatataccggatgagcaaaaaaccatcagagagatttcggccatcatcggactttgtgcatatgctgctacttactggggaggtgaagaccatcccactagtaacagtctgaacgcattgtttgtgatgcttgagatgctcaattacgtggattataacatcatattccggcgtatgaattgatgagttgtacatcttgacattttctttcttctcttctccctttcttctcttctcccttcctccctcttctccctttcccaaaaacaaactttttttacccactataaaataaaatgagtatactacctattatatttcttcctatatttttttattcttcattcgttcagacttttaacgcgcctgaatgtatcgacaaagggcaatattttgcatcattcatggagttagaaaacgagccagtaatcttaccatgtcctcaaataaatacgctatcatccggatataatatattagatattttatgggaaaaacgaggagcggataatgatagaattataccgatagataatggtagcaatatgctaattctgaacccgacacaatcagactctggtatttatatatgcattaccacgaacgaaacctactgtgacatgatgtcgttaaatttgacaatcgtgtctgtctcagaatcaaatatagatcttatctcgtatccacaaatagtaaatgagagatctactggcgaaatggtatgtcccaatattaatgcatttattgctagtaacgtaaacgcagatattatatggagcggacatcgacgccttagaaataagagacttaaacaacggacacctggaattattaccatagaagatgttagaaaaaatgatgctggttattatacatgtgttttagaatatatatatacagaggtaaaacatataacgtaaccagaattgtaaaattagaggtacgggataaaataataccttctactatgcaattaccagatggcattgtaacttcaataggtagtaatttgactattgcgtgtagagtatcgttgagacctcccacaacggatgcagacgtcttttggataagtaatggtatgtattacgaagaagatgatggggacggaaacggtagaataagtgtagcaaataaaatctatatgaccgataagagacgtgttattacatcccggttaaacattaatcctgtcaaggaagaagatgctacaacgtttacgtgtatggcgtttactattcctagcatcagcaaaacagttactgttagtataacgtgaatgtatgttgttacatttccatgtcaattgagtttataagaatttttatacattatcttccaacaaacaattgacgaacgtattgctatgattaactcccacgatactatgcatattattaatcattaacttgcagactatacctagagctattttgacatactcgtgttcttgtgtaattgcagtatctatattattaaagtacgtaaatctagctatagttttattatttaattttagataatataccgtctccttatttttaaaaattgccacatcctttattaaatcatgaatgggaatttctatgtcatcgttagtatattgtgaacaacaagagcagatatctataggaaagggtggaatgcgatacattgatctatgtagttttaaaacacacgcaaactttgaagaatttatataaatcattccatcgatacatccttctatgttgagatgtatatatccaggaattcgtttattaatatcgggaaatgtataaactaaaacattgcccggaagcggagcttctaccggagttatatcagtttttaacttacaaaatgtaaccaatacctttgcatgacttgttttgttcggcaacgttagtttaaacttgacgaatggattaattacaatagcatgatccgcgcatctattaagtttttttactttaacgcccttgtatgtttttacagagactttatctaaatttctagtacttgtatgtgttataaatataacgggatatagaaccgaatcacctaccttagatacccaattacattttatcagatccagataataaacaaattttgtcgccctaactaattctatattgttatatattttacaattggttatgatatcatgtaataacttggagtctaacgcgcatcgtcgtacgtttatacaattgtgatttagtgtagtatatctacacatgtatttttccgcgctatagtattctggactagtgataaaactatcgttatatctgtcttcgatgaactcatcgagatattgctctctgtcatattcatacacctgcataaactttctagacatcttacaatccgtgttattttaggatcatatttacatatttactggtataaagatgttagattagttaatgggaatcgtctataataatgaatattaaacaattatatgaggacttttaccacaaagcatcataaaaatgagtcgtcgtctgatttatgttttaaatatcaaccgcaaatcaactcataaaatacaagagaatgaaatatatacatattttagtcattgcaatatagaccatacttctacagaacttgattttgtagttaaaaactatgatctaaacagacgacaacatgtaactgggtatactgcactacactgctatttgtataataattactttacaaacgatgtactgaagatattattaaatcatgacgtaaatgtaacgatgaaaaccagtagcggacgtatgcctgtttatatattgcttactagatgttgcaatatttcacatgatgtagtgatagatatgatagacaaagataaaaaccacttattacatagagactattccaacctattactagagtatataaaatctcgttacatgttattaaaggaagaggatatcgatgagaacatagtatccactttattagataagggaatcgatcctaactttaaacaagacggatatacagcgttacattattattatttgtgtctcgcacacgtttataaaccaggtgagtgtagaaaaccgataacgataaaaaaggccaagcgaattatttctttgtttatacaacatggagctaatctaaacgcgttagataattgtggtaatacaccattccatttgtatcttagtattgaaatgtgtaataatattcatatgactaaaatgctgttgacttttaatccgaatttcaaaatatgtaataatcatggattaacgcctatactatgttatataacttccgactacatacaacacgatattcttgttatgttaatacatcactatgaaacaaatgttggagaaatgccgatagatgagcgtcgtatgatcgtattcgagtttatcaaaacatattctacacgtcctgcagattcgataacttatttgatgaataggtttaaaaatatagatatttatacccgctatgaaggaaagacattattacacgtagcatgtgaatataataatacacacgtaatagattatcttatacgtatcaacggagatataaatgcgttaaccgacaataacaaacacgctatccaactcattatagataacaaagaaaattccccgtataccatcgattgtttattgtatatacttagatatattgtagataagaatgtgataagatcgttggtggatcaacttccatctctacctatcttcaatataaaatcatttgagaaattcatatcctactgtatacttttagatgacacattttacgataggcacgttaagaatcgcgattctaaaacgtatcgatacgcattttcaaaatacatgtcgttcgataaatacgatggtataataactaaatgtcacgacgaaacaatgttactcaaactgtccactgttctagacactacactatatgcagttttaagatgtcataattcgagaaagttaagaagatacctcaccgagttaaaaaaatataataacgataagtcctttaaaatatattctaatattatgaatgagagataccttaatgtatattataaagatatgtacgtgtcaaaggtatatgataaactatttcctgttttcacagataaaaattgtctactaacattactaccttcagaaattatatacgaaatattatacatgctgacaattaacgatctttataatatatcgtatccacctaccaaagtatagttgtatttttctcatgcgatgtgtgtaaaaaaactgatattatataaatattttagtgccgtataataaagatgacgatgaaaatgatggtacatatatatttcgtatcattattgttattgctattccacagttacgccatagacatcgaaaatgaaatcacagaattcttcaataaaatgagagatactctaccagctaaagactctaaatggttgaatccagcatgtatgttcggaggcacaatgaatgatatagccgctctaggagagccattcagcgcaaagtgtcctcctattgaagacagtcttttatcgcacagatataaagactatgtggttaaatgggagaggctagaaaagaatagacggcgacaggtttctaataaacgtgttaaacatggtgatttatggatagccaactatacatctaaattcagtaaccgtaggtatttgtgtaccgtaactacaaagaatggtgactgtgttcagggtatagttagatctcatattaaaaaacctccttcatgcattccaaaaacatatgaactaggtactcatgataagtatggcatagacttatactgtggaattctttacgcaaaacattataataatataacttggtataaagataataaggaaattaatatcgacgatattaagtattcacaaacgggaaagaaattaattattcataatccagagttagaagatagtggaagatacaactgttacgttcattacgacgacgttagaatcaagaatgatatcgtagtatcaagatgtaaaatacttacggttataccgtcacaagaccacaggtttaaactaatactagatccgaaaatcaacgtaacgataggagaacctgccaatataacatgcactgctgtgtcaacgtcattattgattgacgatgtactgattgaatgggaaaatccatctggatggcttataggattcgattttgatgtatactctgttttaactagtagaggcggtatcaccgaggcgaccttgtactttgaaaatgttactgaagaatatataggtaatacatataaatgtcgtggacacaactattattttgaaaaaacccttacaactacagtagtattggagtaaatatacaatgcatttttatatacattactgaattattattactgaattattattactgaattattattaattatatcgtatttgtgctatagaatggatgaagatacgcgactatctaggtatttgtatctcaccgatagagaacatataaatgtagactctattaaacagttgtgtaaaatatcagatcctaatgcatgttatagatgtggatgtacggctttacatgagtacttttataattatagatcagtcaacggaaaatacaagtatagatacaacggttactatcaatattattcatctagcgattatgaaaattataatgaatattattatgatgattatgatagaactggtatgaacagcgagagcgatagtgagagtgataatatatcaatcaaaacagaatatgagaatgaatatgaattctatgatgaaacacaagatcaaagtacacaactagtaggttacgacattaaactcaaaaccaatgaggatgattttgtggatgaattctatggctatgatagatcagtgggtgtccatgattatatagatgaatcaattaataaagtagtatatggaagagagtctcacgtaagatggcgggatatatggcaagaacataatgatggcgtatacagtataggaaaggagtgcatagataatatatacgaagacaaccataccgtagacgaattctacaagatagacagcgtatcagatgtagatgacgcggaacacatatctccgataactaatgatgtatctacacaaacatgggaaaagaaatcagagttagatagatacatggaatcgtatcctcgtcatagatatagtaagcattctgtctttaagggattttctgacaaagttagaaaaaatgatttagacatgaatgtggtaaaagaattactttctaacggtgcatctctaacaattaaggatagcagtaataaggatccaataaccgtttattttcgaagaacgataatgaatttagaaatgattgatattattaacaaacatacaactattgatgaacgaaagtatatagtacactcctatctaaaaaattataaaaatttcgattatccatttttcaggaagttagttttgactaataaacattgtctcaacaattattataatataagcgacagcaaatatggaacaccgctacatatattggcatctaataaaaaattaataactcctaattacatgaagttattagtgtataacggaaatgatataaacgcacgaggtgaagatacacaaatgcgaactccattacacaaatatttgtgtaaatttgtatatcataatattgaatatggtgtccgatactataatgaaaagattatagacgcatttatagagttaggagccgatctaactattccaaataacgatggaatgataccagtagtttactgtatacactcaaatgcagaatatggttataacaatattactaacataaagataatacgtaaactacttaatcttagtagacgtgcgtcacataatctatttagagatcgagtcatgcacgattatataagtaatacatatattgatcttgagtgtttagatattattagatcgttggatggattcgatatcaatggttactttgaaggacgtacaccacttcattgcgctatacaacataacttcactcagattgctaagtacttattagatcgaggagctgatatatcattaaagacagacgatggtaaaactgtatttgatttatcgttatgtagttacatccctcttaaatggactagctttttgattagtcgtctaccgcctaaaagtgtcatatgctcactgactaaccatataatagattatgttcttacgaacaatagacgtattatttggcagagtcaaatgattaataagtacgtactgttactggacccatccttttattctagatttagaaatgctatcgaaagcaaattaaaccaacacgctaatcgttataataggttcgaacacgatagagatcgcgttaatgaaaattatgacaaagtcttacatgacatagacatatatatcaaggatgtacaaatattaaaatctatttccatcactaataatataacactatacgatactattataaataagtcagagtttcctatacgtcgtgcaaatgacaaacaattaattaataaaataaaatccaatatatatcataatcttatcgaaaaagttattaaaaatgcattagagaaatgcactctgactaatgccgtcctcgagtatatgatgtcatctcgatctcaatcatcttatttgagtcgtattcctaatgagatattactcgaaatattatataaactcgacatgtacgatttacgtaatctatatacaagatatatgagagagaatgatatcacagagtatcatatagagaatacgaggtctgtttctacacagacataaataatgaatacacactacaacgtttttttttaaaatcttagatataacactaaaattacatcaagattataatattgaaatcgtaatttgagttgtttgataatcatggatatcaaaaatgatatacgtaacattagcaatcttttagacgatgatatattatgcgatgtaatcataactatcggagatggagaagaaattaaggcgcataaaactatcttggctgccggatctacgtattttaaaacaatgttcacgacacctatgatagcgagagatctagtaactagagtaaatctacagatgtcgttaaaaatattgtacagtacttatacaataggcatataagttctatgaatgtaatagacgtattaaaatgcgccgacgaggatgaactcacttctcttcattactactgtaaacacatatccacgttctacaaaagcaattattacaagtcaagtcacactaagatgcgaaccgagaagcgattcatctacgcgataatagattatggagcaaacattaacgccgttacacacttaccttcaacagtataccaaacatagtcctcgtgtggtgtatgctcttttatctcgaggagccgatacgaggatacgtaataatcttgattgtacacccatcatggaacgattgtgcaacaggtcatattctcataatgttactcaattggcacgaacaaaaggaagaaggacaacatctactttatctattcataaaacataatcaaggatacactctcaatatactacggtatctactagataggttcgacattcagaaagacgaatactataataccgcctttcaaaattgtaacaacaatgttgcctcatacatcggatacgacatcaaccttccgactaaagacggtattcgacttggtgtttgaaaacagaaacatcatatacaaggcggatgttgtgaatgacatcatccaccacagactgaaagtatctctacctatgattaaatcgttgttctacaagatgtcggagttctctccctacgacgattactacgtaaaaaagatactagcctactgcctattaagggacgagtcattcgcggaactacatagtaaattctgtttaaacgaggactataaaagtgtatttatgaaaaatatatcattcgataagatagattccatcatcgtgacataagtcgccttaaagagattcgaatctccgacaccgacctgtatacggtatcacagctatcttaaagccatacattcggacagacacatttcatttcccatgtacgacgatctcatagaacagtgccatctatcgatggagcataaaagtaaactcgtcgacaaagcactcaataaattagagtctaccatcggtcaatctagactatcgtatttgcctccggaaattatgcgcaatatcatctaaacagtatgttgtacggaaagaaccattacaaatattatccatgatagaaagaaaatatctatatgattggagaagtaggaaacaggaacaagacaacgattactacattattaaatcatgaagtccgtattatactcgtatatattgtttctctcatgtataataataaacggaagagatatagcaccgcatgcaccatccgatggaaagtgtaaagacaacgaatacaaacgccataatttgtgtccgggaacatacgcttccagattatgcgatagcaagactaacacacgatgtacaccctgtggttcgggtaccttcacatctcgcaataatcatttacccgcttgtctaagttgtaacggaagacgcgatcgtgtaacacgactcacaatagaatctgtgaatgctctcccggatattattgtcttctcaaaggatcatccggatgcaaggcatgtgtttcccaaacaaaatgtggaataggatacggagtatccggagacgtcatctgttctccgtgtggtctcggaacatattctcacaccgtctcttccgcagataaatgcgaacccgtacccagtaatacctttaactatatcgatgtggaaattaatctgtatcccgtcaacgacacgtcgtgtactcggacgaccactaccggtctcagtgaatccatctcaacgtcggaactaactattactatgaatcataaagactgtaatcccgtatttcgtgaggaatacttctctgtccttaataaggtagcaacttcaggtttctttacaggagaaaggtgtgcactctgaatttcgagattaaatgcaataacaaagattcttcctccaaacagttaacgaaagcaaagaatgatactatcatgccgcattcggagactgtaactctagtgggcgacatctatatactatatagtaataccaatactcaagactacgaaactgatacaatctcttatcatgtgggtaatgttctcgatgtcgatagccatatgcccggtagttgcgatatacataaactgatcactaattccaaacccacccgctttttatagtaagtttttcacccataaataataaatacaataattaatttctcgtaaaagtagaaaatatattctaatttattgcatggtaaggaagtagaatcataaagaacagtaatcaatcaatagcaatcatgaaacaatatatcgtcctggcatgcatgtgcctggcggcagctgctatgcctgccagtcttcagcaatcatcctcatcctcatcctcgtgtacggaagaagaaaacaaacatcatatgggaatcgatgttattatcaaagtcacaaagcaagaccaaacaccgaccaatgataagatttgccaatccgtaacggaaattacagagtccgagtcagatccagatcccgaggtggaatcagaagatgattccacatcagtcgaggatgtagatcctcctaccacttattactccatcatcggtggaggtctgagaatgaactttggattcaccaaatgtcctcagattaaatccatctcagaatccgctgatggaaacacagtgaatgctagattgtccagcgtgtccccaggacaaggtaaggactctcccgcgatcactcatgaagaagctcttgctatgatcaaagactgtgaggtgtctatcgacatcagatgtagcgaagaagagaaagacagcgacatcaagacccatccagtactcgggtctaacatctctcataagaaagtgagttacgaagatatcatcggttcaacgatcgtcgatacaaaatgtgtcaagaatctagagtttagcgttcgtatcggagacatgtgcaaggaatcatctgaacttgaggtcaaggatggattcaagtatgtcgacggatcggcatctaaaggtgcaaccgatgatacttcactcatcgattcaacaaaactcaaagcgtgtgtctgaatcgataactctattcatctgaaattggatgagtagggttaatcgaacgattcaggcacaccacgaattaaaaaagtgtaccggacactatattccggtttgcaaaacaaaaatgttcttaactacattcacaaaaagttacctctcgcgacttcttctttttctgtctcaatagtgtgatacgattatgacactattcctattcctatttcctttcagggtatcacaaaaatattaaacctctttctgatggtctcataaaaaaagttttacaaaaatatttttttattctctttctctctttgatggtctcataaaaaaagttttacaaaaatatttttattctctttctctctttgatggtctcataaaaaaagttttacaaaaatatttttattctctttctctctttgatggtctcataaaaaaagtttt

SEQ ID NO: 3 - DNA, 212521 bp, Cowpox virus
  source 1..212521: mol_type = genomic DNA
ttacatggatcatcagagggagaaaaaaatatcttgtatattattaactaacaaccttggtttccaaatagcttaagaaggcatttacgtatgacggagatatattccagccgaaaactggataaccatccaaaatattatttgatatagtcgtctttgatataatagacgcgattccgatagcagtctttgtaaatggaacagggtctacagtataagtaccttctgacttctgtttaagtttcttatacaagtcaatgttatagagatcatccatatcagagtcagagtcaactgcatcacgatcttcttgtacgtctagtacagtaacacacgcatcacgtataaatggtttcccatacttttcaatcgctaagtcctcataagtcgtaaactctttaaatattggtcccatatcatcaatgtttagattacgtacgattctcaagtactctttgacaagattataaaaccctcttacttgagttttagctacgataactgaaaatggcatatatttgataaactcctgaaagaataatttcgtcaggactccatctctcatgaagttacatgtatttgtaataacgtcatttaaagtactattttcttgtaaatctaaatgtttaatgattctattaacttcttgattattcatggacttaataacattggctattttatcatccatgtttaaaaaatgacctatatgttgatacttgatattgataattagtataattagtataattagtataattagtataattactatgtattatatttcattattatgaggatttatgtcatatcatgaaattaataagagaactagattaaagtaataggaataggaattggaattacttttcatttgtctcactattataaaaagatgttatatctcaatcactgatatgaagatccatcatatactatgataccgtatcagttcctatcaatctctgttttgggtgattcaaaaaattaataatacctagaaaatattccacgagcattcattcctttatcgatatagcatttggatagcctgtcaatatcgacatcattgaacaacggattcatcttacacttttgaacatcctgagatacattgttccatcttataacccgaattaatacttgaacttaacaatatcgtttataaaaaaatcattcatgggtctgtgtttggacgcttttcatagactgtagtgagtggtcaatatcacatcctatgtaatcaatagcagggttagttgcataatatttcatatacaagtcacgtatttctggtaggttcatgttggaaaatatctccataactaattcttttgggatggtattcaagtaagttggttgatcatggtctatgtagtagatgactttcttcataagattgaatttctctctaataccactaataacatctttcacgatatcgtgatatatgtttgattcggcaattaattctttataatagttgccatacactggaatttttatattattatttaacaatatgttgtatatagttatttcatccgttatatagatagattttaacgacatgacatcactattataacgatacgcgttgtgtaaaacatttatatatttctctctgtatacatcatcgagaggatagttatcttcagcattataatatatattgttcatataacaatattcgtagtcttcttcatcgtcttcctctgtatcacgtactaaaatatcatccctctgttgtatcttaaattctatagcctccttgaacttggaatagaacgacggaaccattaatattagataactaatgacagttggactacattcccatacatctcttactttattcatgagaacacaatcaataatatggtccgtcaatggacctaagatttctttaggaggtaatcgactaatgagaaaactagtccacttacgagcactacatacacgtaatgccaaatagaaaatagttttattattataagttcgtaatgtcatatcagctccattatcgagtaagtattttgcaatacgtatggtgttgtgctttatggcataatgtaatggtgtataaccgttataatatttattaatatcaaacccgtctagagatctaataatatctagacactcggtatctatgtatgactttttaatgtagtcgtgcataacaaaatctctaaataattccggtttagcatgtttactgagtattaaaagtttacgtagtatctttatattttgtatattatcgatattattaatattatggatagccgtaatgacaggaattctgttacgtgcattaggcataattatatccgctcctagttctataaatgtatctatgattatttcattgtagtctagaaaattgcttcttgtaaaaccatgtaagtaataatgtaacggtgttcccaacggagtattttcattcatggcgtttatatcatttccattatacactaataacttcatgtaattaggtgttattaaactttttaaactagctaatacatggagaggagttccgtaaaagatacgcgttaatcccttagagtctccacaataataagttttaagacaatgtttattagtcagaactaacttcttaaagaatggatagtcaaattttttatgatccaatagataaacatgaactaaagacgatctctgtttcatagtaagataatcgtttagtatatcgatcatttctaaattcattatgtcccgtttaaaataggcagatacggctgtattcagattataatccttgactgttaagtcatatccgttagcgaggaaatcttttacaatgttcatatctaaatcattttttctgatttcatcagaatatcccaagatagaattattttttttatatctatcatcgacgacattagtttcttcccatgtttgagtagatgcgtctttagtagacagttctttatattctacatttggttcattacatatcgtattgtagaaagataagtaatcgtcatattcgtttttatttgtggagcttattgtgttgttttctggattctcaaagtattgagatggagatggagatggagattcatgatacttcttgctagcaatataaaagtatttgtgtaatgaatatctttccatcttcaaattataacatatttgataaaaattcaataatctacggaccttcgtccatcttctatctgcgtatattctagccgaactaattccgttgttgagatagcatagtcttcaaacactctaggtataatataattaattatatggtttattatcacaattcaaccatggtgattgtgaattagtactacccaataatcaaatgtgcttgtattgtatctaccggatatgtgtcattaataatacatgctaaagggcccgtatatttttacaatattcagatgatgctgtccaatttgtggtagtatcgtctgaaaagtaatgacatatgttgtttataccaatggtaaggacatattttgaatcttgatattccttcttgaaagtatccatgttccatcgaacatataactaaaaaggaggatataagagatagatataatataactatcatgacgcggtaaattgattcacgcatgataaacatgattatattatatcatcgctaattagttaatttatttttttgttttttattggtaacgtgacgcctaataaaaatgttattttctaacgaatgtaacgaattggcgttctaatgaatgtagcttgttttgttttaggcttatccatctattagttttatggttatatacatcaacatcatgtgttgcattagtcataatatccacgccaccaatcataaataattcgtcacctaatacagctaaagagtaattatatctatatctatatctatgtatagttagtttctctatataattatatgatttcgtatcatctctatattctatatttttaaatctattaatacaatatatacctccgttatacgcgataattgcactattagctgtatatgaacttttcagtttaatacattttctccatcttaaaatcttggtatcacaacgatatataacacctttataagaatttataatgatgtatatattatctcctattgatgtggctgaacagatacctgctacgggcattgtcatctttaaaactctccactttccatcttctggagatcttctttcaatggtaggattataatatctgttgttataatcgtaatatccacaatcaggatctgtaaagcgagctgaatcagtatccgtatctgaatgcggttcagcagtcccacctataaggtatatataatcatttacaacggcaagtccagcattcgctctgggatatacagtagaaggttccttcttccaaatattagtttttgtattataactatatacattagtagttgtaaaattatatgtctgtttaccacacattatgtatacaatatctcctatagcagctatcatgcaattgattgctttaaacggaatatctgatacaatcttccattcattttcaacacggttatacattgccaatttactagaataagtatcatcatctggtgaaatacctacggcgtacaagacgcctgatgaggattttctaggaacagatggaggcagattttcacatcctagttcgttcagaatatacttcttagataatagctcatctactctaattagtttactaatattttccttgaccatgttgatacgttcagtatcgcctttcatccatatacatagtgcatccatggcttcatcttctgattttgtgtcgaggtcgtcgttttcaaatatggagctgataatatcaaatggcaaagatataaacgtatcatctttaactacatgtgtaaaattagttgctgttgtattaatagcagctaattttagatcctccaaattataaaatgctgcataagttataatatctagacagttgatagcgtctaatctttcttttataaattcagtacagaggtctatggcttttgttatatttagagaatctgctagtaccaacatatcctgtacattgtcttcatctatgtccaattcattagtattaatgaacataatcagctttttaatcaagtcatgattgtcgtaagaagttagatttatatctgtggtatcgtcaaattcaaatctatttttaaagaagctgtacgagcatagtaactttttatcagacgtaagtacttgatctcccagaattatattcacgtactcctccattatgtaaaatttaatcgtagaagcgaataatcataaaatattatatcaattttattatacgcatgatagctatctaattaatggttctggtagcgcacatatttggaggtataccgttaatatcgagtttgtttcctatatgaacagtagcagtatcctcttcaaattcctcatcggtattgacatacgcaatatagagatggagatctgatagacagttgcctattaaagtgaaattttcagcgtgtgttgatgctttttcaggaacgcgtgtaaaattaccgattaatacaggttccgtttcagcgttacattttacttctatattcagcgtacacatcttggatgtattttgtttttttgtagtatctgtgaaaagtccggctatagcagttttatcctttacagagtaatattctgttacaaagactggatcacaatctgtactattaacagtaattgtcaattcagaagtcgatataacatctgatgattgttttgtacttagtcgattacaagatgatacgttaactggatatagttcaaaatctatagatatgtagttaaatgtatttgtaatgtatttgtcttcgaagaaaccgggtggaggataatcatttgcaaacgatgcaacaaataatgatgcgaatattagtattgtgtttatgtttatgtttatcatgatgagtatttatgataacaaagttttgtattatccggagtggtacagcattgttctttttgtactttttttgtagtggtatcaggagtacatcttgcacaactattgacggcaggcaccgtacattttaatcctggaccacattgacattttcgtggtttatccggtccacatgattgtgtctctaccatattgcttaaacaagtaacacatgccgtacataaaccatcttcaggttcaagatagtaatccgcaggacacgttttaccaaaggttgtatatactaggcaggttacgatagcggataaaaagataatattcatcttcatgctatttaatacatagtaatatatgtattgtcatttaaaaaaaatattattgtatagaaactttgtacgtgtatttagaacaattttatctcactcacgcttcatcagtaagtcgagcattgataaatgagtcatgatgtctgtcaattatgatttttttaaaatacgttagtctaaatatcccgataatgcaactaaataaaagaggaacgggaatacgcataacgggatacatatccatgatatatctggatatgtcattggctatataatacatagatcgtgcatctgttatgtacttattaattatatcatataatggatcattgccatgacaacacgctactagattgtgattttccctatgtgtgattatgtcctctttgtaacatttactaactagtatatcgtatatgctgatattacttctcgaattaatgtgtaactttgttaacttatcgatgttatctctgatgctaactaacttatcaaatgccaaaaacattgcatgactattatcgagaatcgctatatccctctccatatactcgatgcatttattacagtaatccaatccagctaacataagagccaatctcaatgttggtttaatgatatcatcttcacttaataataacgatggaaactttccagcagcgtaacacttatctaagaaggatataactatgtctacattaggtctcttgtcgagaatattcttaacaagataccattggtgtcccgacaacatattattttccatggttaacattagaggatctacaccattttttgttggtatattaatattggcttggatggataataagtacacaaatgaatccatgacaatattggcattagtatgcgagataatagatacatgcaatggtgtcataccagacgtttcacatactgcgttattatatctttctataatcgcacaatgatatacatcatgtatatctgtactatcatacggctcatattcatcagtatataagtcagtaggtatattatatttagcaatgatatgatgaataatgcatggagtgtcgtctactctaattaatagatcttgaagtatacgatgctttaccatgtttaatactttatcagatatcagacaatctattatgtcataatacatataattttgagcggtgcatatatatgaagttaatggagtataccctaaacaattgacggctgttatatcagcacccaaggatagcagacactgaataacatctagtcttatatcgttatcggtttctggatctaagatatgaacaacagacaacatagagagatatgtgtgtagtaccgtattaccaatattgtcgggttcatttacatcattgccgtactcgtgtaaaagtttaataatgttcgtacttatattgtgtctcagtatatattgatgaagacaagttcttccagcactatctttataatgtagttttactcctggttgtaaaaaggagtaaacgactgatatatcgatattccgagctagtgttatatacgagtggagtatcataggtatattttttactttatcgccatctagcgattctatatatgcgtttgttatttctggattaacattatctatattggtcatgtatgtcataatcggactcattccattaacgcatttcatgtccatgtctccacctagttcgataatctttttaattacgtctacacaaacatttcctgttatcatgtatgtgtgcaacggggtaataagattactattctgcaaatttacatcaactccgttattgcataaccactctaatatatctatatcaacattcatgttgccgagatacgcgtgtaggataccgtatcctgttttcttgcatacataattaagatttacaattcctacatctaccatatatttaattaagtctagttttatacagcgagttctcggtgagttgaaatacgtatatagaatatccatatctccattgttgggaatatcaaacacatgattggcggttttacttttattatctttaataatatatttgacgaattttttatactgatcaaccaacgatttattttttctatccgcttttagcattaaaatcatactaccgatgatatcaatcaatgctgttttactatctgtatactgttgacgttgtctattatcaataccataatatttctttttaaaaacttttatgtgtttatatctaactgtatgattataactgtatatatccccatcgctacagtatccatcatctggatcataattatttatacgagcattggtgcttatacggttatcaaaatcctccaagcatgtcgaatatatcagttttctaacattaactatagcgtgttcggttaatgatgccattttgataactataatcaaaaactgtcagtgttggtagtacataaaaagtttatattattgttacatttttttaaaaagatcaaggtataaaaattagaagtgttagattatattaattatactataaaaattagaagtgttagactattaactaacttataaaactatcttattaactattaactaacttataaaactatcttataactattaactaacttataaaactatcttatgactattaactaacttataaaactatcttataactattaactcatttcaagaagggtgggtggagagaactctatatgatagcttgtgaaacaattagatccctaatttctaatggaagttttgataggagattgtcatcagttgatacattgtttattatctcatctattagagcacgtctgtttagagctttagcgacatgctcgtttacttctgtgtaaatcttgaatcctctagtaatacactgtgtcaaaactggatgtttagaatacctatgtagaatatgggaagcatgcttgtttttgtctctattatagattaactcatacatggttgtattatgaattttcatctgcctaatgtactccaattcttgtttacaattaactatataatcaaagagtgatgattcatacacatcacaaagtgaataatctaccatcataaaatacttgatacagagctttatcacatcatggttttcaactgtattattaagtatagctgattttatacagtcgatagacaatggttctctaagcactaattctaatattttaagatgtatgtccctacgggcgatgactgatcccctatccactgccacatcaagacatgtatatccatcactcattactgcgttgacatttgctccattttctaatagccatgatactaaatctatataacctgcatagatagcgcgataaagcaaggtccttccgccagcatctagttgattgatatcttcaatatatgggatacaaagcttacaaatttctaatactgtgggttcatctacaatgaatctcctactatactgaattattttatatagatctacgttgacatcattttcatctaggataccacaatttaaaataaactcaacaacgttactttcttttttacacattcccccaaaataggcattcaagcattctattttatatattacagccccatgatctaccataaaatcaacaatgtctatttctacatatgcattagatagatagcaaagtaagagatcttgcacagaattacaattcttaataatcatagagaaaatatcttccgtataattccttgacactaatgcagatataatatcttgatatgtaatatatgcaaacagtctatctactatatactgatcaatattgtctctatgaatcctaaaataatcatagagaatatctacaggatcactaaatggttcaaggagaaatctatcaaatatcttcctatcaacaactggttctagaacataacagtcaacacccaatccatgttttgcatagtcatctatcaaagataaggaccgaaggtcgtcgtgaaactgctcatcgacagccatgaaatctgccgactccatggtgtgaatcgcactgtcttatccgccattgattttcattttttataactatacacttaatatttttaagtctctagtgattatgaaaatatttataactaaccagtgtttcgtttactgtcctccatttttctaactaacgatctaagatgcattatacaatcttcgccatcgaaccatttttttagtctaaactcggaagtagttagccacatatttttattagtggcctcctgtgttttgacagtatattcttcgccattataaagataaaactgatcaaatgtagatttattgtctgtatagtcgcattcataaaaatatgtcaagtcttcatatggagtacttgtaggaactcttctaaacagagagaaaaactcactaaacacatttttataaaacggtaagaaaatttcatcacctatcatgaacgggatggttggacggatatcttttccatcaaacgttataatttgagaatcatcaagatatacatctactgtagaatgtgtatcactgccatttatttctagattgaagttgaatgcgagtttgtgacagtcaataagagatacaagagatacaagagatatcgcataatattgtagatgcattgttgtatgatttatatatccgacaataaataaatacgtatactactgaagaatacaagaaattaattcagatgatttaatgtcggcaatatcgctgaagtgttacgctttagtgtctctctgaatcctgataaatcatacatatcaatgatacaattacgcagtaaactagtaggaatacacatatctggataggtacgtaaatagtagattatatcttttacaatactattagtctttattgcgttatctatatatccattaataatatcatagaatgcatacttatcagaagtatacatcttacagatttctatacatgaagtaatatcaatattgtatgttctacttattagtatatcatatatagatatagtagaatagttgttaatatgtgtagacattaataaactaatattatctcgaatatccactagtacatctaaagtatgactcagtgatctataattagttgtattttgtgtttccaaatcatgttttatacgctcgataaatttgttacaattatttactcctatcaacataaatgccaacgccatcattccatacaggttagtatttttagtactacataacgaaaataatgattcgtttttatagcatttatctaaaaatattataatattatctatagaaggtctgttatctagtaacatcttaactatatgacaattagtatatctatctctacgaaatattaacatcaatgcagtaagaccctttatagttggtttatcgatactatatccaatagataataaatatttcattattacatcattgcgtatacaaacggctacgtgaaacgcagtcattccagaaaatggcaatatattattattatagtactttatcattcgaaaatgatacgcatcattagttttgtaattacattttttatattcatcggtgtatgagtctacaggaatattatatttagtaataacatgatgaattattctcagcgatatatcttttctagttattagatcttggattatacgatgctttaccatgtttaatactttatcagacatcagacaatctattatgtcgtgatacatataattttgtgcggtacatatgtaggatgttaatggggtataacctaaattattaaccaacgatatatctgatcctgaacgtataagatatttaacaacttctatgtttatattgttattgatactcgaatcatatgtcaaatttttattaacgatacataatctagaaagatatgtgtgtagtactgtattaccaaaatcatcgacctcattcagatagttaccatgctcgagtaaaagtttaacgatatcgatatttatataagttcgtaacatataattgtgaagacaagttcttccaacactatctttgtaatcaaggattacaccattttttagaaaatgttttacaacgtctatatcaacatattgagccatttgtatatacagatacaatatctctggtatattagttatcttgttatcgtccatgtaaatctttataatttcttcgtctatattcatcgcattatatattatataagtcattataggagttaacttcatacaacatctgagattcctatcagcacctagttcaataactttctttaacacacttgctgaaattgattcgtctctccgtaaatatgaatgtaatggagtaattagatgattgttttgttcatttatattctttccacttctacataataattctagtacatctgtgtctacgtacatattaccgagatatgtatgcaatataccagatccatattcgtttttataattaatatctacgcctttagcaatcatccatttaaccaattttatgtcgatgcctatcgtgttatgtgctttgaaatatacagagaatatgttactactatatttgccactgttttcataacgactatcctcgtcctcatcatcactatcactatcactatcactattatcgtccttattatcatcatagtctattaaacacaaatcatctacgtctataacaacattctcatcattaattagttctgtagtaatatctttaataatttggctatacatctgttcaatactatctattgatgatttctttttacgacttaaactagttatgtaatgacgatgaaatcgagtagtaacttctaataaagacttgatattgttgtcatatgtttgatcgtcgtaattaatagtgtggctaatggtactgttaataagtttatagacaatatcatagtattttctttccagaactagattatttttaaatactgatctaacatatatgtcgtaactatcatactgattctcacaatcccgtgatgtagcagtagttggtgcatggtctatatcgttaaaatgtatcgtatataatagttttctgacgtggagtacagaattttcgattaatgagttcatggtaaggaagtgcgaatgaatgcctgcctgtatataatataaataagttaatattttttatcatatttttctaataccatataaaaatatcattatgtataatcatcactgtcgctatcattattgcgtttgtgtagttctgccctatcatctacatcactgtcactgtcactctcgctataacttctaaaattacaaacaactggatattcgataacagcatttgtgtagtttttgtcttttacagtatatacgttattgtcaaaatctaaacaaatattagcataatacctatctataagatcaggatccatgttcgagcatactagcatatttgtaacttcgtcgtacagcgttagatcaatagaataaacaatcttgtggcgcaactttttacgatctagttgtatgagtttatcgtttacataagccattaacggctttaacagatgatctgagtaatatacctctattatacatttaatgttcaccgtcttagtatttttagatatcaattgtaatttacatccatattcgactcccttgtgtaacgttagacattctaaatctatattattatctattacagcataaaacacatgcatttttttaacagcaacacattcaatattgtattgttatttttatattatttacacaattaacaatgttattagtttatattactgaattaataatataaaattcccaatcttgtcataaacacacattgagaaacagcataaacacaaaatccatcaaaaatgtcgatgaaatatctgatgttgttgttcgctgctatgataatcagatcattcgccgatagtggtaacgctatcgaaacgacatcgccagaaattacaaacgctacaacagatattccagctatcagattatgcggtccagagggagatggatattgtttacacggtgactgtatccacgctagagatatcgacggtatgtattgtagatgctttcatggttatattggtattagatgtcagcatatagtattagtagactatcaacgttcagaaaaaccagacactacaacatcatatatcccatctccaggtattgtgcttgtattagtaggcattattattacgtgttgtctattatctgtttataggttcactcgaagaactaaactacctctacaagatatggttgtgccataatttttataaaatttttttatgagtattttacaaaaatgtatatgtatgtcgtatgtatatttataaaaaaatgctaagtatgcgatgtatcctgtattatttgtatttatctaaacaatactctacctctagatgtgatacaaaaattttttatttcagcatattaaagtaaaatctagttaccttgaaattgaatacagtgagtggttccgtatcaccagtaagaacataatagtcgaatacagtatccgattgagattttgcatacaatactagtctagaaagaaaattgtaatcatcttctgtgacgggagtccatatatctgtatcatcgtctagtttatcagtgtcccatgctatattcctgttatcattattagttaatgaaaataactctcgtgcttcagaaaagtcaaatattgtatccatgcatacatctccaaaactatcacttatacgtttatctttaacgatacctatacctagatgattatttactaacagacattttccagatctattgactataactcctatagtttctacatcaaccaagtaatgatcatctattgttatataacaataacataactcttttccatttttatcagtatgtatatctatatcaacgtcgtcgttgtagtgaatagtcgtcattaatttcctatatgaaatggatatatctagaacggcaattgtcgtgcgtccagataacactttctttgatttaaagtctagagtctttgcaaacataatatccttgtctgactttatatttcctgtagggtggtataattttattttgcctccacatatcggtgtttccaaatatattactagacaatattccatatagttattagttaagggtacccaattagaacacgtacgcttataatcatcatttggatcgtatttcataaaagttattgtgttatcgatgtcaacacattctacattttttaatcgtctatatagtatttttctgatattttctataatatcagatttgtcttccatcggaagttgtatactatcggaatcagttacatgtttaaataattctctgatgtcattccttacacaatcaaattcattattaaacagtttaataatctgcagacctttgtcgtcgtaaatatccattgtcttattagttacgcttatttttatgtgttttacgttgctttattatattttataagaatgattgtttgacaatgtcgtagtatagatatattattagaggtgtatatattataaaaagtttttgattacgacgttataagaggaaagaggacatcattaacatcatacatcatacaaaattacattcttataacgtcgtaatcaaaaataattaattgcaattttgatgtataacaactgtcaatggattaatggaattgtatattacacattatacggtattctgtaacggcaaacaccgatcggtaattgtctgccggtgtaacagatatataattctatatctattacaccggccaagtatacataataatgatgagttgtggtagtattatctacatatttataatttaggactttgtattcagtatttttggaatcataaaaaataaaaaaagttttaccattttaaaatttaaaaagtatttacatttttttcactgtttagtcgcggatatggaatttgatcctaccaaaatcaatatatcatctatagatcatgtaacaatattacaatacatagatgaaccaaatgatataagactaacagtatgtattatccaaaatattaataacattacatattatatcaatatcacaaaaataaatccacatttggctaatcaatttcggacttggaaaaaacgtatcgctggaagggactatatgactaacttatctagagatacaggaatacaacaatcaaaacttactgaaactatacgtaactgtcaaaaaaatagaaacatatatggtctatacatacactacaatttagttattaatgtggttattgattggataaccgatgtgattgttcaatcaatattaagagggttggtaaattggtacatagctaataataactatactccaaatacacccaataatacaacaaccatttcggagttggatatcatcaaaatactggataaatacgaggaagtgtatagagtaagtaaagaaaaagaatgtggaatttgctatgaagttgtttactcaaaacgattagaaaacgatagatactttggtttattggattcgtgtaatcatatattttgcataacatgtatcaatatatggcatagaacacgaagagaaaccggtgcgtcggataattgtcctatatgccgtacccgttttagaaacataacaatgagcaagttctataagctagttaactaataaataaaaagtttaattatcgacgacgcatgtcgttatttttctcatattaaagattaatttgattctaatataatcttcagtattggatgaatctcaattcaaattaattacatcagattatatcatgaataaaaaatagtagcatgcactacttcagccaaatattcttttttgaaacgccatctatcgtagtgaggacacacgtgaacctataatgagcaaatttattagtatcggttacatgaagaactttacgtagagtggtgattccaccatctgtggtacgaacggtttcatcttccttgatgccatcacccagatgttctataaacttggtagcctcgtccgatttcatatcctttgccaaccaatacatataactaaaatcaggcatatgttccacacatcctgaacaatgaaattcgccagaagatgttacaatgtctaggttaggacatttggtttcatcggcgttaacatatgagtgaacacacccatacatgaaagcgatgagaaataggattctcatcttgccaaaatatcactagaaaaaatttatttatcaattttaaaggtataaaaaatacttattgttgctcgaatattttgtatttgatggtataaggcaaattagaaatgtaggtattgtcatcaactgattctatgtttttatgaattttattatgcttcactatcgcattggaaataatatcatatacttccacgtatattttattttgttttgactcataatacgcacgtaattctggattattggcataccgatgaataattttagctccatgatcagtaaatattaatgagaacatagtgttgcctcccactattatttttttcatctcgttcaattcttgattgcaaatatctatataatcattatagtgtttacttatggactctggaatcttagacgatatacagtcatctataatcatggcatatctaatacattgttttatagcataggcattatctactatgttagatatttctctcaatgaatcaatcacacaatctaatgtaggtttatgacataatagcatgttcagcagttcaatgtttctagattcgttgattgcaatggctatacatgtatatccgttatttgatctaatgttgacatctgaaccggattctagcagtaaagacactagagattgtttattatatctaacagccttgtgaagaagtgtttctcctcgtttgtcaatcatgttaatgtctttaagataaggtaggcaaatgtttatagtactaagaattgggcaagcataagacatatcacgaaaaccctgtctgtatgtatcagtgtagaaattataacgtccatagttggatttacataggtgtccaatcgggatctctccatcatcgagatgattgacggcatctcccccttccttttttagtagatatttcatcgtgtaagaatcaatattaatatttttaaagtatccgtgaatagcctctttatttaccacagctccatattccaacatgtattccactagagagatatcgatatcgctgaatgttatatactcaattagtatatgttggaggacatccgagttcattgttttcaatatcaaagagatggtttccttatcatttctccatagtggtacaatactacacattattccgtgcggttttccattctccaaaaacaatttgaccaaatctaaatctacatctttattgtatctataatcactatttagataatcagccataattcctcgagtacaacatgttagatcgtctatatatgaataagccgtgttatctattcctttcattaacaatttaacgatgtctatatctatatgagatgacttaatataatattgaagagctgtacaatagtttttatctatagaagatgggttgattccatgattaatcagacatttaacaacttccgggttcacacatgatctcgaatccgactctgaatacagatgagagatgatatacagatgtaatactgtaccgcaatttcgtggttgataatcgtcattttgtgagtgatattcttcatacgcgtatccgtactcatcatcctcgtcctcataaataacactgcatccattttctatgaataaatcaataatttcaggaacaggatcatctgtcattacataattttctataactgaatgatgtttttcgcatttaacactaaaatcaaatccatgttctaccaatacctttatcaagtcaatatctacatttttggatttcatataggtgaatatattaaagtcatttatgttgctatatccagtagcttctagtagaaccatcgctatatccttattaactttaccatgtctactatttgtgtattcccctaatggagtaagctgtctccaatttttgtgtaatggattagtaccactgtctagtagtagtttgacaacctcaacattattacagtgctcattgaaaaggtatgcatgtagagcattattcttgaattggttcctggtatcattaggatctctatctctcaacatctgtttaagttcatcgagagccacctcctcattttccagataatcaaacattttgactgaatagaagtgaatgagctactgtgaactctatacacccgcacaactaatgtcattaaattatcatttttgaatgtatttataccagatcaaaaacttgtacaattattaataaaaaataatttagtgtttaaattttattaactccagagtttacacctccgttaacacctccattaactccactttttacaccactagacgatcctccccacattccacctccaccagatgtataagttttagatcctttactacagccatcatgtccgtgaatgaagacactccacataccaccgctactacctcctttagaagacatattaataagacttaagagttaagacaagtttaacagtaaaattaatcacaagtactcctaccaacctacactattatatgattatagtttctattttttacagtaccttgactaaagtctctagtcacaagagcaatagtaccaacctacattattatatgattatagtttctatttttataggaacgcgtacgagaaaatcaaatgtctaatttctaacggtagtattgataaacgattattgtcagcggataccgcctctatcatgttgtctattttattactttcttctattaacttattcgcgttgtaaattatttgattataaaacttatattgccttttagcccactctgtaaaaactggatgtcttacatatcgtttctttgtatgtttgtttaacttgtacattatggtgaatatgtccataccgtttattttaatttgacgcatatccgcaatttctttttcgcagtcggttatatattctatataagatggatacgtatcacatgtgtacttataatcgactaatatgaagtacttaatacatattttcagtaacgatttagtcttattacctattaataagtgcctgtcgttggataggtaatcaactgttttcttaatacattcgatggttggtaatttactcagaataatttccaatatcttaatatatatttctgctatttctggtatacatgcatgtgccattataacacaaataccaatacatgtagacccatatgttgttgttatattaatatctgcgccattatctattaaccattctactaggctgacactatgcgactcaatacaatgataaagtatactacatccatgtttatctattttgtttatatcatcgatatacggcttacaaatttttagtatcgataacacttctgactcacgaatagataaggtagggaataatggcataatatttattatgttatcattatcattaacaactacgtttccattttttaaaatatactctacaactttaggatccctattgtcaaatttttgaaaatatttatttatatgcttaaatctatataatgtagctccttcatcaatcatacatttaataacattgatgtatactgtatgataagatacatattctgacaatagatcttgtatagaatctgtatatcttttaagaattgtggatattatgatattattacgtaaactattacacaattctaaaatataaaacgtatcatgctcagataatagtttatcaactatataattatctattttgtaatttttattcctaaattgtttacgtaaatagttagatagaatatgcattagttcatgaccactatagttactatcgaataacgcgtcaaatatttcccgtttaatatcgcatttgtcaagataataatagagtgtggtatgttcacgataagtataataacgcatctctttttcgtgtgaaattaaatagtttatcacgtccaaagatgtagcataaccatcttgtgacctagtaataatataataatagagaactgttttacacattctatcatcataatcagtggtgtagtcgtaatcgtaatcgtctaattcatcatcccaattataatattcaccagcacgtctaatctgttctattttgatcttgtatccatactgtatgttgctacacgtaggtattcctttatccaataatagtttaaatacatctacattgggatttgatgttgtcgcgtatttctctacgatattaataccatgtttgatgctatttatttctagacctttcgaaattaataatttcaataattctatatcgacgttatcagaacatacatattcgaatatatcaaagtcattgatatttttatagtcgactgacgacaataacaaaatcacaacatcgtttttgatattattatttttcttggtaacgtacgcctttaatggagtttcaccattatactcatataatggatttgcaccactttctatcaatgattgtgcactacaggcatcaatgttaaatgttttacaactatcatagagtatcttatcgttaatcatgatcgtgggtgatgttatcgcatatttttgattctttcatttcagttatgtatggatttagcacgtttgggaagcatgagctcgtatgatttcagtactgtagtgtcagtactattagtttcgatcagatcaatgtctagatctatagaatcaaaacacgataggtcagaagataatgaatatctgtacgcttcttcttgtaccgtaacttctggttttgttagacgatcacatcgtgcttttacatcaatggtacaaattttatcctcactttgtgtatcatattcgtctctgctataaaattgtatattcagattatcatgcgatgtatatacgctaactgtatcaataaacggagaacaccatttagtcataacggtaatccaaaattttttaaagtatatcttaacgaaagaagttgtgtcatcgttaggatttggcaaatcgttgtctacagtgtatggtactagatcctcataagtgtatatatctaaagtaatgtttaatttatcaaatggttgataatatggatcaacagaacgacaatttccgaagacggaaataagacatagacacgcaataaatctaattgcggtcatggtctcaaataaaaatacgaataaacactttgtctatttagtaagtggcatttaacacgatactattaatccatggactcataatctctatacgggattaacggatgttctatatacggggatgagtagttctcttctttaactttatactttttactaatcatatttagactgatgtatgggtaatagtgtttgaagagctcattctcatcatcagaataaattaatatctctgtttttttgttatacagatgtatcacagcctcatatattacgtaatagaacgtgtcatctaccttattaactttcacggcgtagttgtttgcaaatacggttaatcctttgacatcgtcgatctccgaccaatcaggtcgtataatgaatctgaactttaattgcttgtacccatttgaaataatttttagtctgcatccgtagttatcccctttatgcaactgtaaatttctcaacgctatatctccattaatgatgatgtcgaattcgtgttgtatacccatactggatggataaacgaataccaacggtgttaatagtaatttactttttcatctttacatactgggtactagttttactatcataagtttataaattccacaagctactatggagtaagccaaccatcttagtatagcacacatgtcttaaagtttattaattaattacatgttgttttatatatcgctacgaatttaaacagagaaatcagttaggaagaaaaaattatctatctacatcatcgtctattggataacgtctctgtattctacgatagagtgctactttaagatgcgacagatccatgtcatcaaatatatactccattaaaatgattattccggcagcgaacttgatattggatatatcacgacctttgttaatatccactacaatagacagcagtcccatggttccataaacagtgagtttatctttctttgaagcgatattttgtagagatcttataaaactgtcgaatgacatcgcatttatttctttagctaattcatatatgtcaccatcgtaatatctaacagcatctatcttaaacgtttccatcacgttaaagacgtttccgatagatggtcttgcttcatcaggcatactgagccaacaaatgtaatcgtgtataacatctttgatagaatcagactctaaagaaaacgaatcagctttattatacgcattcatgataaacgtaaacaatgaaaaatgtttttcgttgtttaagttggatgaatagtatatcttaataattgttattatttcactaattaatatttagtaacgagtgcctctataaaaaactatacgacaatgacataactaaacataacgagatatcaaagaatgtgaatgtctaggacgcgtattttttatacgatatagatcctgtaagcgttgtatgtattctggagctattttctctatcacattagtgagatcagtatatatgttataaagtagtctattaactcttttattttctagccatagtaattctctagttactacgatcacatactgaatctgcatccaattttagaaattggtctgtgttacatatctcttctatattattgttgatgtattggcttagaaaactattacttagaccattttctttataaaacgaatatatagtactccaattatctttaccgatatatttgcacacataatccattctctcaatcactacatctttaagattttggttgttaagatatttggataaactatataattctattagatcatcaaccgaatcagtatatattcttctggatccaaagataaactctttggcgtcctctataatattctcagaaaagatattttcgtgttttagtttatcaagatctaacctgttcatatccatgataacagcataaaataaaaatccattttcatttttaacacaatactattcataattgagattgatgtaatattttgttactttgaacgtaaagacagtacacggatctgtatctccaacaagcacgtagtaatcaaatttggtgttgttaaactttgcaatattcatcaatttagatagaaacttatactcttcatctgttttaggaatccatgtattattaccactttccaacttatcattatcccaggctatgtttcgtccatcatcattgcgcagagtgaataattcttctgtattcggtagttcaaatatatgatctatgcatagatcggtaaagctatcgtagatgtgatgtttcctaaaacgagtattatactcgtttactatcaaacactttcctgatctatcaaccaatacacacatggtttctaaatctatcaagtggtggggatccatagttatgacgcagtaacatagattattaccttcttgactgtcgctaatatctatatacttatcgttatcgtattggattctacatatagatggcttgtatgtcaaagatatagaacacataaccaatttatagtcgcgctttacattctcgaatctaaagttaagagatttagaaaacattatatcctcggatgatgttatcactgtttctggagtaggatatattaaagtctttacagatttcgtccgattcaaataaatcactaaataatatcccatattatcatctgttagagtagtatcattaaatctattatattttatgaaagatatatcactgctcacctctatatttcgtacatttttaaactgtttgtataatatctctctgatacaatcagatatatctattgtgtcggtagacgataccgttacatttgaattaatggtgttccattttacaacttttaacaagttgaccaattcatttctaatagtatcaaactctccatgattaaatattttaatagtatccatttttatatcactacggatacaaagtagctgacataaaaaccattgtataatttttatgttttatgtttattagcgtacacattttggaagttccggctgccatgtatttcctggagagcaagtagatgatgaggaaccagatagtttatatccgtgtctgcacttaaagtctacattgtcgttgtgtgagtatgatcttttaaacccgctagacaagtatccgtttgttattgaaggatgtgggcatttaacgatctgacacgtgggtggatcggaccattctcctcctgaacacacgatgccagagttaccaatcaacgaatatccactattgcaactatacgttacaacgcttccatcggtataaaaatcctcgtatccgttatgccttccattggttacagatggaggggatgggcatttaacagattcacaaatgggtgcctcgggattccacaccatagatccagtatatcctagttcacaatacgatttagattctcctatcaactgatatccgctattgcaagagtacgttatactagagccaaactctactccaccaatatcaatttgaccattatcaatatctcgaggtgatggacatttccgtttaatacattgattaaagagtgtccatccagtacctgtacatttagcatatataggtcccattttttgctttctgtatccaggtagacatagatattctatagtgtctcctatgttgtaattagcattagcatcagtccccacactattcttaaatttcatattaatgggacgtgacggaatagtacagcatgatagcacgcatcctattcccaacaatgtcaggaacgtcacgctctccaccttcatatttatttatccgtaaaaatgttatcctatgcattgtccaataataaaaagtcatgctattgtaggaattgtttttcacagttgctcaaaaacgatggtagtgacttacgagttacgttacactttggagtctcatctttagtaaacatatcataatattcgatattacgagttgacatatcgaacaaattccaagtatttgattttggataatattcgtattttgcatctgctataattaagatataatcaccgcaagaacacacgaacatctttcctacatggttaaagtacatgtacaattctatccatttgtcttccttaactatatatttgtatagataattacgagtctcatgagtaattccagtaattacatagatgtcaccgtcgtactctacagcataaactatactatgatgtctaggcatgggagacttttttatccaacgatttttagtgaaacattccacatcgtttaatactacatatttctcatacgtggtataaactccacccattacatatatatcatcgtttacgaataccgatgcgcctgaatatctaggagtaattaagtttggaagtcttatccatttcgaagtgtcgtgtttcaaatattctgctacacccgttgaaatagaaaattctaatcctcctattacatataactttccatcgttaacacaagtactaacttctgattttaacgacgacatattagtaaccgttttccattttttcgttttaagatctacccgcgacacggaataaacatgtctattgttaatcattccgccaataatgtatagacaattatgtaaaacatttgcattatagaattgtctatctgtattaccgactatcgtccaatattctgttctaggagagtaatgggttattgtggatatataatcagagtttttaatgatcactatattatgttttataccatttcgtgtcaccggctttatagatttggatatagttaatcccaacaatgatatagcattgcgcatagcattagtcataaacttgggatgtaaaatgttgatgatatctacatcgtttggatttttatgtatccactttaataatatcatagctgtaacatcctcatgatttacgttaacgtcttcgtgtgataagatagttgtcagttcatcctttgataattttccaaattctggatcggatgtcaccgcagtaatattgttgattatttctgacattgacgcattatatagttttttaattctatattttttagaaaagttaaacatccttatacaatttgtggaattaatattatgaatcatagtttttacacatagatctactacaggcggaacatcaattatcacggcagcaactagtatcatttctacattgtttatggtgatgtttatcttcttccagcgcatatagtctaatagcgattcaaacgcgtgatagtttataccattcaatataatcgcttcatcctttagatggtgatcctgaatgcgtttaaaaaaattatacggagacgccgtaataatttccttattcacttgtataatttccccattgatagaaaacgtcacgctttccattcttgaagtactataagtaattatagtataatgtaaaggtttatatattcaatatttttataaaaatcatttcgacattaattcctttttaaatttccgtctatcatctatagaaacatgttctatgaatttataaaatgcttttacgtgtcctatcgtaggcgatagaaccgctaaaaagcctatcgaatttctacaaaagaatctgttatatggtatagggagagtataaaacattaaatgtccgtacttattaaagtattcagtagccaatcctaactctttcgaatacttattaatggctcttattctgtacgaatctatttttttgaacaacggacctagtggtatatcttgttctatgtatctaaaataatgtcttacgagatccgttagtttaatatccgcagtcatcttgtctagaatggcaaatctaactgcgggtttaggctttagtttagtttctatatctacatctatgtctttatccaacactaaaaatataatagctaatattttattacaatcatccggatattcttctacgatctcactaactaatgtttctttggttatactagtatagtcacgatcagacaaataaagaaaatcagatgatcgatgaataatacatttaaattcatcatctgtaagatttttgagatgtctcattaaaatattattagggtcagtactcattatcatatattggcagcagctattacttattttatttttctgtattttattatttttcaccatatagatcaatcattagatcatcaaaatacttttcaatcatcctaaagagtatggcgaacgaatcttcccatctaatttctgaacgttcaccaatgtctctagccactttggcactaatagcgatcattcgcttagcatcttctatattattaactggttgattcaatctatctagcaatggaccgtcagacagtgtcattctcatgttcttaatcaatgcacatacatcgccgtcatctaccaattcatccaacgacataagatttttaaaatcatcattataataggatggatcgccatcatttctccaaagaatatatctaataagtagagtcctcatgtttagtaatttaactattttagttaataactattttttatgttaaatcaagtagcaccactatgttaatacttattcatattttagtttttaggattgataatcaacataaaaattaatacatcatcaattttggaaatactttgtttccacgtagtcaatgaaacatttgagctcatcgtataggacgttctcgaataggacgtaattatatactggtttatatttgttcaagatagatacaaatccgataacttttttgacgaagtctacgggatccactttaaaagtgtcataccgggttctttttattcttttaaacagatcaatggtgtgatgttgattaggtcttttacgaatttgatacagaatagcgtttacgtatccaccatagtgatcaatcgccatttgttcgtatgtcataaattctttaattatatgacatgttgtattatttagttcatccttgttcatcgttaggaatctatccaaaatggcaattatactagaactataactgcgtcgttgtatacacatatcgatgtgtctgtttatacaatcaatgatattaggatccatgctactaccttcgggtaaaaatgtagcatcatatacctctagtacgttaggttcatcgttacccattgtagaggacgtcataatcgaattctaaaaaaatatattatttttatgttattttgttaaaaataatcatcgaatacttcgtaagatactccttcatgaacataatcagttacaaaacgtttatatgaagtaaagtatctacgatttttacaaaagtcaggatgcataagtacaaagtacgcgataaacggaataataatagatttatctagtctatctttttctatagctttcatagttagatacatggtctcagaagtcggattatgtaacatcagcttcgataaaatgattgggttatttattcttacacattcgctcatacatgtatgaccgttaactacagagtctacactaaaatgattgaacaatagatagtctaccattgcttcgtattcagatagtacagcgtagtacatggcatcttcacaaattatatcattgtctaatagatatttgacgcatcttatggatcccacttcaacagccatcttaaaatcagtagaatcatattgttttcctttatcattaataatttctagaacatcgtctctatcataaaagatacaaatattaactatttgatccgtaataacattgctagtagatagcaatttattaataagttgcgctggggtcaatgtcttaacaagaagggtaagaggactatctccgaatttgttttgtttattaacatccgttgatggaagtaaaagatttatgatgtctacattcttgactggtttagagcatacaatatggagaggtgtatttccatcatgatctggttttgagggactaattcctagtttcatcatccatgagattgtagaagcttttggattgtctgacataagatgtctatgaatatgatttttgccaaatttatccactatcctggcttcgaatccgatggacattatttttttaaacactctttctgaaggatctgtacacgccaacaacggaccacatccttcttcatcaaccgagttgttaatcttggctccataccgcaccaataaatttattctctctatgacttcatcatctgttcccgagagataatatagaggtgttttatgctgtttatcacatgcgttcggatctgcaccgtgtgccaacagcgtcgcaactattctattattgttaattttagaagctatatgtaatggataatttccatcatcgtccgtctcatttggcgagtatcctatatgaagaagttcttcaacaaatcgttcatctagtcctttaattccacaatacgcatgtagaatgtgataatgtccagaaggttcgattgcttgcagcatattcctaaatacatctaaatttttactattatacttggcataaagagatagataatactctgctgacataatgttgtctattgtagtataaaaattaatatttctatttctatttctatttctatatatttgcgacaatttactctctataacaaatatcataacttacttcttttatgtcaagaaagcactggtttagttcatccataaatgtcacgccataactaccgcgcataccatactcagaattacgataaagatatttatccttggggtgtaggtaatggggattaatctttgttggatcagtctctaagttaacacacgtcacacaggatccatttatagttatatcacatgatgatttatgatgaattgattccggaagatcactatcgtattttgtggttccacaattcatttccatacatgttattgtcacactaatattatgatgaactttatctagccgctgagtggtaaacaacagaacagatagtttattatctttaccaactccctcagccgccgctacaaatctctgatccgtatccatgatggtcatgtttatttctagtccgtatccagtcaacactatgttagcatttctgtctatatagctttcactcatatgacactcacccataatagtagaattaatgtcataatttacaccaatagtgagttcggcggcaaagtaccaataccggtaatcttgtcgaggaggacatatagtgttcttgtattcggcagaatacccgagagatacgacacaaaggagtaagactaatttgtaaaccatcttacacaatagtacgatgcaattagcaataagacaatggaaatctatctataacatataattattctatcaattttaccaattagttagtatagtgtttaacaaaaatgttggagaatctaattagtttttccgcgcataattgacgtacatgagtctgagttccttgtttttactaattatttcatccaatttattattcttgacaatatcgaggtcttttgtataggagtcagacttgtattcaacatgcttttctataatcatcttagctatttcggcatcatccaatagtacattttccagattaacagaatagatattaatgtcgtatttgaacagagcctgtagcatttcaaggtctttgttatctatagccaatttgatgtccggaatgaagagaagggaattgttagtgttggtagattccatatagtcaagcaagagaatcatcatatccacgtttccattttttatggagtcgtgaatgcaactgtatagaatagccaggtcaaaagtagatggtatctctgaaagaaagtatgatacaatacttacatcattaagcatgacggcatgataaaatgaagttttccatccagttttcccatagaacatcagtctccaatttttcttaacaaacagttttaccgtttgcatgttgccactatcaaccgcgtaatacaatgcggtgtttcctttgtcatcaaattgtgaatcatccattccactgaatagcaaaatctttgctattttggtatcttctaatgtggctgcctgatgtaatggaaattcattctctagaagatttttcaatgctccagcgttcaacaacgtacatactagacgcacgttattatcggctattgcataatacaaggcactatgtccatggacatccgccttaaatgcatctttgctagagagaaagcttttcagctgcttggacttccaagtattaattcgtgacagatccatgtctgaaacgagacgctaattagtgtataatttttcattttttataattttgtcatactgctccagaattaataatatctctaatagatctgattagtagatatatggctatcgcaaaacaacatatacacatttaataaaaataatattcattaaggagattcagattccaccgtacccatcaatataaataaaataatgattccttacaccgtacccataatattaataattatccttccaccgtaccaatcaatataaataaaataatgattccttacaccgtacccataaacaatattaaggagattccaccttacccataaacaatataaatccagtaatatcatgtctaatgatgaacacaaatggtgtattaaattccagttgttcaggagatgatctagccgtagctaccatgatagtagatgcctctgctacagttccttgttcgtcgacgtctatctttgcattctgaaacattttatagatatataatgggttcctagtcatatgtttaaacgacgccttatctggattaaacatactaggagccatcatttcggctatcgacttaatatccctcttattttcgatagaaaatctagggagtttaagattgtacactttattccctaattgagatgaccaatagtctaattttgcagccgtgatagaatctgtgaaatgagtcatattatcacctattgccaggtacatactaatattagcatccttatacggaaggcgcaccatatcatattcttcatcgtcgacggtgattgtatttccttgcaatttagtaactacgttcatcatgggaaccgttttcgtaccgtacttattagtaaaactagcattgcgtgttttagtgatatcaaacggatattgccacgtacctttaaaatatatagtattaatgattgcccatagagtattattgtcgagcatagtagaatctactacattagacataccggatctacgttctactatagaattaattttattaaccgcatctcgtctaaagtttaatctatataggccgaatctatgatattgttgataataagacggtttaatacatacagtactatcgacgaaactttgataagttagatcagtgtacgtatatttagatgttttcagcttagctaatcccgatattaattctgtaaatgctggacccagatctctttttctcaaatccatagtcttcaataattctactctagtattacctgatgcaggcaatagcgacataaacatagaaaacgaatagccaaacggcgagaagacaatattatcatcctcgtccccatcctgaatatttttatacgctaatataccggcattggtaaatccttgcagacgatatgcggacgccgtacacgctaacgatagtatcaataacgcaatcatgattttatggtattaataatttaccttatttttatgtttagtataaaaaattattgatgtctgcacatccttttgtaattgacatctatatatccttttgtataatcaactctaatcactttaacttttacttttttccctacaagtttatccctatatttaaaatatctatccatatgcatctgaacactctctgccaagatagctgcagagtgaggatagtcaaaaagatcaatatatagagcataatcattctcgtatactctgccctttattacatcgcccgcattgggcaacgaataacaaaatgcgagcatctcgttaacgggctcgtaaattgggataaaaattatgtttttattgttttatatctattttattccagatagtattcaggaatttctttttccggttgtatctcgtcgttgtatatatcatttgtgcattgtttcatattttttaatagtctacatcttttagtaggactagtatcgtacaattcatagctgtattttgaattccaatcacgcataaaaatatcttccaattgttgacgaagacctaatccatcatccggtgtaatattaatagatgctccacatgtatccgtaaagtaattccctgtccaatttgaggttcctatatacgccgttttatctgttaccatatatttggcatggtttaccctagaatatggaattggaggatcggcatccggtacaataaacagttttacttctatatctatgtttttagattttagcatagcgatagatcttaaaaagtttctcataataaacgaagatcgttgccagcaactaatcaatagcttaactgacacttgtctgtctatagcggctcttcttaattcatcttctatatacggccaaaacaaaattttacccgccttcgaataaataatagggataaagttcataacggatacataaacgaatttactcgcatttccgatacatgacaataaagcggttaaatcattagttctttccatagtacatagttgttgtggcgcagaagcaataaatacagaatgtggaacaccgcttacgttcatactaagaggatgatctgtattataatacgcaggataaaagtttttccaattatatggtagattgttaactccaagataccagtatacctcaaaaatttgagtgagatccgctgccaagttactattattgaagatagcaatacccaattccttgacctgagttagtgatctccaatccatgttagcgcttcctaaataaatatgtgtattatcggatatccaaaattttgtatgaagaactcctcctaggatatttgtaatatctatgtatcttacttcaactccggccatttgtagcgtttcaacatcctttaatggtttgttggatttattgacggctactctaacgcgtactcctcttttgggtaattgtataatctcatttaatattatcgtgccgaaattcgtacccacttcatccgataaactccaataaaaagatgatatatctagtgtttttgtggtattggatagaatttccctccacacgttaaatgtagacaaatatactttatcaaattgcatacctataggaatagtctctgtaatcactgcgattgttttatccggattcattttatttgttaaaaaaaataatatcacttcactctattaaaaatccaagtttctatttctttcataactgattttttaacttcgtccgtttccttatgaagatgatgtttggcaccttcataaatttttatttctctattacaatttgcatgttgcatgaaataatatgcacctgaaacatcactaatctcattgtttgttccctggagtatgagactaggggtgttaatcttgggaattatttttctaaccttgttggtagccttcaagacctgactagcaaatccagccttaattttttcatgattgaccaatggatcgtattggtatttataaacttcatccatatctctagatactgattctgggcatagctttccgactggtgcatttggtgtgaagcttcccataagtttggcagctagcatatttagtcttggaacagcttctgtattaactagaggagacattagaatcattgctgtaaataagtctggattctcataagcggccagtatagaaattgttgctcccatggaatgacccaataagaagactggaactcctggataagtagatttaatagtcaccacgtgctgtaccacatctctaacatacgtaccaaagtcatctatcatcattttttcaccattacttcttccatgaccaatatgatcatgtgagaatactaaaattcctaacgatgatatattttcagctagttcatcataacgtccagaatgttcaccagctccatgacttatgaatactaatgccttaggatatgtaataggtttccaatatttacaatatatgtaatcattgtccagattgaacatacagtttgcactcatgattcacgttatataactatcaatattaacagttcgtttgatgatcatattatttttatgttttattgataattgtaaaaacatacaattaaatcaatatagaggaaggagacggatactgtcttttgtgagatagtcatggcgactaaatcagattatgaggatgccgttttttactttgtggatgatgatgaactatgtagtcgtgactccatcatcgatctaatagatgaatatatcacgtggagaaatcatgttatagtgtttaacaaagatatcaccagttgtggaagactgtacaaggaattgatgaagttcgatgatgtcgctatacggtactatggaattgataaaattaatgagattgtcgagactatgagcgaaggagaccactacatcaatctcacagaagtccatgatcaggaaagtctattcgctaccataggaatatgtgctaaaatcactgaacattggggatacaaaaagatttcagaatctagattccaatcattgggaaacattacagatctgatgaccgacgataatataaacatcttgatactttttctagaaaaaaaattgaattgatgacatagtgttataacgcgtaattattatgttaatgcattcttattctatatccggtgttaaaaaaaattatcctatcatgtatttgagagtcttatatgtagcaaacatgatagctgtgatgccaataagctttagatattcacgcgtgctagtgttggggatggtattatctggcggtgaaatgtccgttatataatctacaaaacaatcatcgcatatagtatgcgatagtagagtaaacatttttatagtttctactggattcatacatcgtctacccaattcggttatgaatgaaattgtcgccaatcttacacccaaacccttgttatctattagtatagtattaacttcgttatttatgtcataaactgtaaatgattctgtagatgccatatcatacatgatattcatgtccctattataatcattattaactttatcacaatacatgttgataatatctatatatgatctagtttttgttggcaactgtctatacaagtcgtctaaacgttgtttactcatatagtattgaacagccatcattacatggtcccgttccgttgatagataatcgagtatgttagtggacttgtcaaatctatataccatattttctggaagtggatatacatagttgtgatcatcattatcgctagcctcatcttctatatccggtactataccattatctatatccggtactataccattatctatatccggtactataccattatctataccatcatctacatcatcatctacataatctactatattattatacataaacatcgacaacatactattgtccattatctaagtccagttgatccaaacccttgagctcctctatctgtactatctagagattgtacttcctccagttctggataatatatacgttgatagattagctgagctattctatctcccgtatttacattgaacgtacattttccattattaataagaatgactcctatgtttcccctataatcttcgtctattacaccacctcctatatcaatgccttttagtgacagtccagacctaggagctattctaccatagcagaacttaggcatggacatactaatatctgtcttaattaactgtctttctcctggagggatagtataatcgtaagcgctatacaaatcatatccggcagcacccggcgattgcctagtaggagatttagctctgttagtttccttaacaaatctaactcgtgagttaatattcatgttgctcataaaactaatattttatttcaaaattatttaccatcccatatattccatgaataagtgcgattattatacacttctatagtatctatatacgaaccacgataaaatcctcctatcaatagcagtttattatccactatgatcaattctggattatccctcggataaataggatcatctatcagattccatgtattgctgtattcgcaataaaattcagcatttctaccaaccaagaataaccttctaccgaacactaacgcgcatgatttataatgaggataataagtggatggtccaaactgccactgatcatgatcgggtagcaaatattctgtagttgtatccgtttcagaatgtcctcctattacgtatataacattgtttatagatgcgattgctggattacatctaggtttaagaagactcggcatattaacccaagaagtatccccatggaaccaacgctcgacagatgtgggatttggtagacctcctactacgtataatttattgttagcaggtaccccactagcgtacagtctgggactattcatcggaggaattggaatccaattgtttgatacacaatttaacgctatagcatggttatgtatttcattgttcatccatccaccgatgagatatactacttctccaacatgagtacttgtacacatatggaatatatctataatttgatccatattcataggatactctatgaatggatacctgtatgatttgcgtggtcgtttatcacaatgaaatattttggtacagtctagtatccattttacattatttatacctctgggtgaaagataatttgacctgattacatttttgataaggagtagcaaatttcctaatctatttcttcgcttcatataccacttaatgacaaaatcaactacataatcctcatctggaacatttagttcgtcgctttctagaataagtttcatagatagataatcaaaattgtctatgatgtcatcttccagttccaaaaagtgtttggcaataaagtctttagtatgacataagagattggatagtccgtattctatacccatcatgtaacactcgacacaatattcctttctaaaatctcgtaggataaagtttatacaagtgtagatgataaattctacagatgttaatatagaagcacgtaataaattgacgacgttatgactatctatatatacctttccagtatatgagtaaataactatagaagttagactgtgaatgtcaaggtctagacaaaccctcgtaactggatctttatttttcgtgtatttttgacgtaaatgtgtgcgaaagtaaggagataactttttcaatatcgtagaattgactattatattgcctcctatagcctcaataattgttttgaatttcttagtcatagacaatgctaatatattcttacagtacacagtatttacaaatattggcatttatgtttctttaaaagtcaacatctagagaaaaatgattatcttcttgagacataactcccattttttggtattcacccacacgtttttcgaaaaaattagtttttccttccaatgatatattttccatgaaatcaaacggattggtaacattataaatttttttaaatcccaattcagaaatcaatctatccgcgacaaattctatatatgttttcatcatttcacaattcattcctataagtttaactggaagagccgcagtaagaaattcttgttcaatggataccgcatctgttataatagatctaacggtttcttcactcggtggatgcaataaatgtttaaacatcaaacatgcgaaatcgcagtgcagaccctcgtctctactaattagttcgttggaaaacgtgagtccgggcattaggccacgctttttaagccaaaatatggacgcaaatgacccagaaaagaagattccttctactgcggcaaaggcaacaagtctctctccataactggcgctgtcatgtatccacttttgagcccaatcggccttcttttttacacaaggcatcgtttctatggcattaaagagatagtttttttcattactatctttaacataagtatcgatcaaaagactatacatttccgaatgaatgttttcaatggccatctgaaatccgtagaaacatctagcctcggtaatctgcacttctgtacaaaatcgttcagctaaattttcattcactattccgtcactggctgcaaaaaacgccaatacatgttttataaaatgtttttcgttgggtgttagtttattccaatcattgatatctttagatatatctacttcttccactgtccaaaatgatgcctctgcctttttatacatattccagatgtcatgatattggattgggaaaataacaaatctatttggatttggtgcaaggatcggttccataactaaattaacaatagtagtaaattttttttcagttatcatctatatgactgtatttggatcttttatacattgccattgcagctatcactacaataattacaagtattattgatagcattgttattagtactatcataattaaattatctacatccatgggtgctgaataatcgttattatcatcattttgtaattgtgacatcatactagataaatcatttgcgagattgttgttggaaactgacatggaggatgcgttagcattatcgttattattatttaacgcctcccattctgattcacaaatgttacgtgcgttcaacattttatggaaactataattttgtgaaaacaggtaacaagaaaactcttcatcgttcaaatttttaacaatagtaaaccgattaaacgtcgagctaatttctaacgctagcgactctgttggatatggatttccagatatatatcttttcagctcccctacgtatctataatcatctgtaggaaatggaatgtatttccatctatctagtgttcctaatatcatatatggtggtgtagtagaaccattaagtgtgaaagattttatttcgcatcgtattttaacttcgcaataagattttgttagataacgcacactaccattcaaatcaatgatattagcctttacagatatattcatagtagtcgtgactatgactccatcttttagatgcgatactcccttgtatgtaccagaatcttcgtacctcaaactcgatatatttaaacaagttaatgagatattgacgcgttttatgaatgacgatatatatccagaagtttcatcctctgtggctagcgctataaccttatcattataataccaaagagtatgattaatatgtgatacgtcagtgtgggtacaaatatgtacattatcgtctacgtcgtattcgatacatccgcatacacccaacagatataaaatgataaatactctaacaacgttcgtacccatattgatgcggcttaatacatgttttgatttcaatttattgtaaaaaaagaatcggttttatacggttcgatattcttattctcgtctatcatctccacacagtcaaatccgtggttagcatgcacctcatcaaccggtaatagactatcggactcttctatcattataactcgagaatatttaatttgctcattattaatcaagtcaattatcttatttttaacaaatctgagtattttactcattttttataaaaacttttagaaatatacagactctatcgtgtgtctatatcttctttttatatccaatgtatttatgtctgatttttcttcatttatcatatataatggtccaaattctacacgtgcttcgaattcatccagatcattaatgttcttataatcgtaatatccttctcctcccgcttctacatcttccttcttattcttattcttattcttgtcacagaatctaccacaacaggatcccatgacgagcgtcatattaaactaattcattttcaattataatatactgattagtaatgaccattaaataaaaatattcttcataaccggtaagaaagtgaaaagttcacattgaaactatgtcagtcagtagttatacatcatgaaatgatgatatatatattctctattttggcggaggattatatgatataattcgtggataatcattcttaagacacatttcttcattcgtaaatcttttcacgttaaatgagtgtccatattttgcaatttcttcatatgatggcggtgtacgtggacgatgctgctcctgttcttgttgtggtcgccgactgtcgtgtttgcgtttagatccctccattatcgcgattgcgtagatggagtactatttttataccttgtaattaaatttttttattaattaaacgtataaaaacgttccgtatctgtatttaagagccagatttcgtctaatagaacaaatagctacggtaaaaataactagaataatcgctacacccactagaaaccacggatcgtaatacggcaatcggttttcgataataggtggaatgtatattttatttaaggacttaacaattgtctgtaaaccacaatttgcttccgcggatcctgtattaactatctgtaaaagcatatgttggccgggcggagccgaacattctccgatatccaatttctgtatatctataatgttattaacctccgcatacgcattacagttcttttctagcttggataccgcactaggtaaatcatttaggtctattcctatttcctcagcgatagctcttctatccttttccggaagcaatgaaatcacttcaataaatgattcaaccatgagtgtgaaactaagtcgagaattactcatgcatttgttagttattcggagcgcgcaatttttaaactgtcctataacctctcctatatgaatagcacaagtgacattagtagggatagaatgttgagctaatttttgtaaataactatctataaaaagattatacaaagttttaaactctttagtttccgccatttatccagtctgagaaaatgtctctcataataaatttttccaagaaactaattgggtgaagaatggaaacctttaatctatatttatcacagtctgttttggtacacatgatgaattcttccaatgctgtactaaattctatatctttttcgatttctggatatgtttttaataaagtatgaacaaagaaatggaaatcgtaataccagttatgttcaactttgaaattgttttttattttcttgttaatgattccagccacttgggaaaagtcaaagtcgtttaatgcagatttaatacgttcattaaaaacaaactttttatcctttagatgaattattattggttcattggaatcaaaaagtaagatattatcgggtttaagatcagcgtgtaaaaagttgtcgcaacagggtagctcgtaaactttaatgtataacagagacatctgtaaaaagataaactttatatattgtaccaaagatttaaatcctaatttgatagctaactcggtatctactttatctgccgaatacagtgctaagggaaaaattataatgtttcctctttcgtattcgtagttagttctcttttcatgttcgaaaaagtgaaacatgcggttaaaatagtttataacattaatattactgttaataactgccgggtaaaaatgggatagtaatttcacgaatttgatactgtcctttctctcgttaaacgcctttagaaaaactttagaagaatatctcaatgatagttcctggccatccatagtttgtatcaataataacaacatatgaagaacccgtttatacagagtatgtaaaaatgttaatttatagtttaatcccatggcccacgcacacacgattaattttttttcgtctccctttagattattgtacagaaatttgggtactgtgaactccgcagtagtttccatgggactatataattttgtggcctcgaatacaaattttactacatagttatctatcttaaagactataccatatcctcctgtagatatgtgataaaaatcgtcgtttataggataaaatcgtttatccttctgttggaaaaaggatgaattaatgtaatcattctcttctatctttagtagtgtttccctattaaaattcttaaaataatttaacaatctaactgatggagcccaattttggtgtaaatctaattgggacattatattgttaaaatacaaacagtctcctaatataacagtatctgataatctatggggagacatccattgatattcaggggatgaatcattggcaacacccatttattgtacaaaaagccccaatttacaaacgaaagtccaggtttgatagagacaaacaattaactattttgtctctgtttttaacacctccacagtttttaatttctttggtaatgaaattattcactatatcagtatcttctttatctaccagagattttactaacttgataaccttggctgtctcattcaatagggtagtgatatttgtatgtgtgatattgatatctttttgaattgtttcttttagaagtgattctttgatagtgtcagcatacgaattacaataatgcagaaactcagttaacatgcaggaattatagtaagccaattccaattgttgcctgtattgtattagagtgtcaatatgtgcaatggtgtccttgcgtttctctgatagaatgcgagcagcgattttggcgttatcatttgacgatatttctggaatgatgaatcctgtttctactaactttttagtaggacaaagcgaaacaatcaagaagatagcttctcctcctatttgtggaagaaattgaactcctctagatgatctactgacgatagtatctccttgacagatattggaccgaattacagaagtacctggaatgtaaattcctgaaacgccctcattttttaaacagattgttgcagtaaatcccgcactgtgaccaagatagagagctcctttggtgaatccatctctatgtttcagtttaaccaaaaaacagtcagctggtctaaaatttccatctctatctaatacagcatccaacttgatgtcgggaaccataaccggtttaatgttatatgtaacattgagtaaatccttaagttcataatcatcactgtcatcagttatgtacgagccaaacaatgtttctaccggcatagtggatacgaagatgctatccatcagaatgtttccctgattagtgttttctatatagctattcttctttaaacgattttccaaatcagtaactatgttcatttttttaggagtaggacgcctagccagtatggaagaggattttctagatcctctcttcaacatctttgatctcaatggaatgcaaaaccccatggtgtaacaaccaacgataaaaataatattgtttttcactttttataattttaccatctgactcatggattcattaatatctttatacgagctactaatgtacaattctttataactgaactgagatatatacatttgatctatggtttccatgattgagtaaatgaatgctctgcaataactaatggcaaatgtatagaacaacgaaattatactagagttgttaaagttaatattttctatgagctgttccaataaattatttgttgtggctgcgttcaagtcataaatcatcttgatactatccagtaaacagtctttaagttctggaatattatcatcccattgtaaagcccctaattcgactatcgaatatcctgctctgatagcagtttcaatatcgacggacgtcaatactgtaataaaggtggtagtattgtcatcatcgtgataaactacgggaatatggtcgttagtaggtacggtgactttacacaacgcgatatataactttccttttgtaccatttttaacgtagttgggacgtcctgcaggatattgttttgaagaaatgatatcgagaacagatttgatacgatatttgttggattcctgattattcactataatataatctagacagatagatgattcgataaatagagaagatatatcgttggtaggataatacatccccattccagtattctcggatactctattgatgacactagttaagaacatgtcttctattctagaaaatgaaaacatcctacacggactcattaaaacttctagcgctcctgattgtgtctcgaatgcctcaaacaaggatttcaaggatgccatagattctttgaccaatgatttaatattgcgtttagcatctgatttttttattaaatcgaatggtcggctctctgatttactaccccaatgataacaatagtcttgtaaagataagccgcaagaaaatttatacgcatccatccaaataactctagcaccatctgatgatattagtgtattattatagattttccatccacagttattgggccagtatactgttagcaacggtatatcaaatagattactcatgtaacctactagaatgatagttcgtgtactagtcataatatctttaatccaatctaagaaatctaaaattagatcttttacactgttaaagttaacaaaggtattacccgggtacgtggatatcatatatggtattggtccattatcagtaatagctccataaactgatacggcgatggtttttatatgtgtttgatctaacgaggaagaaattcgcgcccacaattcatctctagatatgtatttaatatcgaacggtaacacatcaatctcgggacgcgtatatgtttctaaattcttaatccaaatataatgatgacctatatgccctattatcatactgtcaactatagtatacctagagaacttacgatacatctgtttcctgtaatcgttaaattttacaaatctataacatgctaaaccttttgacgacagccattcattaatttctgatatggaatctgtattctcgataccgtatcgttctaaagccagtgctatatctccctgttcgtgggaacgctttcgtataatatcgatcaatggataatctgaagtttttggagaataatatgactcatgatctatttcgtccataaacaatctacacataggaattggaggcgatgatcttaattttgtgcaatgagtcaatcctataacttctaatcgtgtaatattcatcatcgacataacactatctatgttatcatcgtatattagtataccacgaccttcttcatttcgtgccaaaatgatatacagtcttaaataattacgcaatatctcaatagtttcataattgttagctgttttcatcaaggtttgtatcctgtttaacatgatggcgttctataacgtctctattttctatttttaattttttaaatttttaacgatttactgtggctagatacccaatctctctcaaatatttttttagcctcgcttacaagctgtttatctatactattaaaactgacgaatccgtgattttggtaatgggttccgtcgaaatttgccgaagtgatatgaacatattcgtcgtcgactatcaacaattttgtattattctgaatagtgaaaaccttcacagatagatcattttgaacacacaacgcgtctagacttttggcggttgccatagaatatacgtcgttcttatcccaattaccaactagaagtctgatcttaactcctctattaatggctgcttctataatggagttgtaaatgtcgggccaatagtagctattaccgtctacacgtgtagtgggaactatggccaaatgttcaatatctatactagtcttagccgacttgagtttatcaataactacatcagtgtctagatctctagaatatcccaataggtgttctggagaatcagtaaagaacactccacctataggattcttaatatgatacgcagtgctaactggcagacaacaagccgcagagcataaattcaaccatgaattttttgcgctattaaaggctttaaaagtatcaaatcttctacgaagatctgtggccagcgggggataatcagaatatacacctaacgttttaatcgtatgaatagatcctccagtaaatgacgcatttcctacataacatctttcatcatctgacacccaaaaacaaccgagtagtagccccacattattttttttatctatgttaacagttataaaatttatatccgggcaataactttgtagctctcccagatttcttttccctcgttcatctagcaaaactattattttaacccctttttcagatgcctcttttagtttatcaaaaataagagctcccctagtagtactcataggattacaacaaaaagatgctatgtatatatatttcttggctagagtgataatttcgttaaaacattcaaatgtagtcaaatgatcggatctaaaatccatattttctggtagtgtttctaccagcctacattttgctcccgcaggtactgatgcaaatggccacatttagttaacataaaaacttatacatcctgttctatcaacgattctagaatatcatcggctatatcgctaaaattttcatcaaagtcaacatcacaacctaactcagttaatatattaagaagttccatgatttcatcttcgtctatttccatatccatatccattgtagattgttgactgattatcgagtttaaatcagtattaatacccaattcttcagaatacactcggtgtttcatcgtaaccctctatcagtaacgtatttaagttggtagattttcaattatgtatcaatatagcaacagcagttcttgctcctccttgattctagtatcctcttcattattttcttctacgtacataagcatgtccaatacgtttgacaacatgccgacgatggcggctgccacagatacgaatatgactaaaccgatgaccatttaaaaaccactctctagctttcacttaaacttatagatcattcttttagcacatgtataatataaaaacattattctatttcgaatttaggcttccaaaaatttttcatccgtaaaccgataataatatatatagacttgttaatggtcggaataaacagattaatgcttaaactatcgtcatcaccacgattagagatacaatacttacattctttttgctgtttcgaaactttatcaatacacgttaatacaaacccaggaaggagatattgaaactgaggctgttgaaaatgaaacggtgaatacaatagttcagataatgtaaaatcatgattccgtattctgatagtattagaactgttaatggatgcagatggaacgtatctaggtgtatctattttaacaaagcatcgatttgctaatatacaattatccttttgattaattgttattttattcatattcttaaaaggtttcatatttatcaattcttctacattaacaatttccatttttaatttatgcagccccgcaatactcctcattacgtttcattttttttctagaatatccattttgttcatttcggcacatagattatccaattgagaagtgcatttagtagttttgtatattttaagtttattgacgaatcgtcgaaaattagttatagttaacattttattatttgataccctgatattaatacccctgccgttactattatttataactgatgtaacccatgtaacattagaattaattatcgatagtaatgcatcaacgcttccaaaattgtctattataaactcaccgataatttttttattgcatgttttcatattcattaggattatcaaatctttaatcttcttacgattgtatgcgttgatattacaagacgtcattctaaaagacggaggatctccatcaaatgccagacaatcacgtacaaagtacatggaaataggttttgttctattgcgcatcatagattcatatagaactcccatagaaatactaatttgttttactctataaaatactaatgcatctatttcatcgttatgtataacgtctttccaagtgtcaaattccaaatttttttcattgatagtaccaaattcttctatctctttaactatttgcatagataggtaattacagtggtgtctacaagctgttttttgaaactgaatcgatgcatctagaagcgatgctacgctagtcacaatcaccgctttcatatttagaatatatgtatgtaaaaatatagtagaatttcattttgtttttttctatgctataaatgaattctcattttgcatctgctcatactccgttttatatcaataccaaagaaggaagatatctggttctaaaagccgttaaagtatgcgatgttagaactgtagaatgcgaaggaagtaaagcttcctgtgtactcaaagtagataaaccctcatcacccgcgtgtgagagaagaccttcgtccccgtccagatgcgagagaatgaataaccctggaaaacaagtcccgtttatgagaacggacgtgctacaaaatatgtttgctgctaatcgcgacaacgtggcgtcgagacttttgaactaaaatacaattatatctttttcgatattaataaatccgtgtcgcccgggttttttatctctttcagtatgtgaatagataggtattttatctctattcatcatcgaatttaagagatccgataaacattgtttgtattctcccgatgtcagcatctgatacaacaatatatgtgcacataaacctctggcacttatttcatgtaccttccccttatcactaaggagaatagtatttgagaaatatgtatacatgatattatcatgaattagatatacagaatttgtaacactctcgaaatcacacgatgtgtcggcattaagatctaatatatcgctcgataacacattttcatctagatacactagacattttttaaagctaaaatagtctttagtagtaacagtaactatgcgattattttcatcgatgatacatttcatcggcatattattacgcgtaccatcaaagactataccatgtgtatatctaacgtattctagcatagttgccatacgcgcattaaacttttcaggatctttggatagatcttccaatctatctatttgagaaaacatttttatcatgttcaatagttgaaacgttggatccactatatagatattatctataaagattttaggaactacgttcatggtatcctggcgaatattaaaactatcaatgatatgattatcgttttcatcttttatcaccatatagtttctaagatatgggattttacttaatataatattatttcccgtaataaattttattagaaatgccaaatctataagaaaagtcctcgaattagtttgaagaatatctatatcgccgtaccgtatatttggattaattagatatagagaatatgatccgtaacatatacaactcttattatggcgtctaagatattcttccatcaacttattaacatttttgactagggaagatacattatgacgtcccattacttttgccttgtctattaccgcgacgttcatagaatttagcatatctcttgccaattcttccattgatgttacattataagaaattttagatgaaattacatttggagctttaatagtaagaactcctaatatatccgtgtatgtggtcactaatacagattgtagttctataatcgtaaataatttacctatattatatgtttgagtctgtttagaaaagtagctaagtatacgatcttttatttctgatgcagatgtatcaacatcggaaaaaaatctttttttattcttttttactaacgatacaaatatgtctttgttaaaaacagttattttctgaatatttctagcttgtaattttaacatatgatattcgtttacactaggtattctgcctaaataggtttctataatctttaatgtaatattaggaagagtattctgatcaggattcctattcattttgaggatttaaaactctgattattgtctaatatggtctcaacgcaaactttttcacagagcgatagagtttttgataactcgtttttcttaagaaatataaaactactgtctccagagctcgctctatcttttattttatctaattcgatacaaactcctgatactggttcagaaagtaattcattaattttcagtcctttatagaagatagttaatatagatagtacaaaatcttcagttcttgataccgatcggattgatcctagaactagatatattaataaagtactcattaggcagtttatggcagcttgataattagatatagtatattccagttcatatttattagataccgcattgcccagattttgatattctatgaattcctctgaaaataaatctaaaataactagacattctattttttgtggattagtgtactctcttccctctatcatgttcactactggtgtccacgatgacaaatatctagagggaatataatatagtccataggatgccaatctagcaatatcaaataactgtaattttattcttctctcttcattatgaattaattcttgaggtataaacctaacacaaattatattattagacttttcgtatgtaatgtctttcatgttataagtttttaatcctggaatagaatctatcttaatgaggcttttaaatgcggagttctccaacgagtcaaaacataatactctgttgtttttcttatatacgatgttacgattttcttctttgaatggaataggtttttgaattagtttataattacaacataatagatacggaagtgtacaaatagtacgcggaaaaaacataatagctcccctgttttcatccatggttttaagtaaatgatcactggcttccttagtcaatggatattcgaacattaaccgtttcatcatcattggacaaaatccatatttcttaatgtaaagagtaatcaaatcattgtgtttattataccatcttgttgtaaatgtgtattctgttatcggatctgctcctttttctattaaagtatcgatgtcgatctcgtctaagaattcaactatatcgacatatttcatttgtatacacataaccattactaacgtagaatgtataggaagagatgtaacgggaactgggtttgttgattcacaaactattctaatacatagttcttctgttaatacgtcttgtacgtaatctattatagatgccaagatatctatataattattttgtaatatgatgttaactatgtgatctatataagtagtgtaatatttcatgtatttggatatatgttccaactctgtctttgtgatgtctagtttcgtaatatctatagcatcctcaaaaaatatattcgcatatattcccaagtcttcagttctatcttctaaaaaatcttcagcgtatggaatataataatctattttgcctcttctgatgtcattaatgatatagtttttgacactattttccgtcaattgattcttattcactatatctaagaaacggatagcgtccctaggacgaactactgccattaatatctctattatagcttctggacataattcatctattataccagaattaatgggaactattccgtatctatctaacatagttttaagaaagtcagaatctaagacctgatgttcatatattggttcatacatgaaatgatctctattgatgatagtgactatttcattctctgaaaattggtaactcattctatacacgctttccttgttgataaaggatagtatatactcgatggaatttgtaccaacaaactgttctcttatgaatcgtatatcatcatctgaaataatcatgtaaggcatacacttaacaattagagacttgtctcctgttatcaatatactattcttgtgataatttatgtgtgaggcaaatttgtccacgttttttaattttgttatagtagatatcaaatccaatggagctacagttcttggcttaaacagatatagtttttctggaacgaattctacaacattattataaagaactttgggtagataagtgggatgaaatcctattttaattaatgcgatagccttgtcctcgtgcagatatccaaacgcctttgtgatagtatgacattcattgtctagaaacgctctacgaatatctgtaacagatatcatctttagagaatactagtcgcgttaatagtactaaaatttgtattttttaatctatctcaataaaaaaattaatatgtatgattcaatgtataactaaactactaactgttattgataactagaactagaatcagaatctaatgatgacgtaaccaagaagtgtatctacagccaatttagctgcattatttttagcatctcgtttagattttccatctgccttatcgaatactcttccgtcgatgtctacacaggcataaaatgtaggagagttactaggccccactgattcaatacgaaaagaccaatctctcttagttatttggcagtactcattaataatggtgacagggttagcatctttccaatcaataatttttttagccggaataacatcatcgaaagacttatgatcctctctcattgatttttcgcgggatgcatcatctattatggaatcagccatagcatcagcatccggcttatccgcctccattgtcgtaaaccaacgaggaggaatatcgtcggagctgtacaccatagcactacgttgaagatcgtacagagctttattaacttctcgcttctccatattaagttgtctagttagttgtacagcagtagctccttcgagtccaatgtttttaatagcctcacacacaatctctgcgtcagaacgttcgtcgatatagatcttagacatttttagagagaaatgacgcaaaaccagtaataaaactaatctattttatcatttttattcatcatcttctggtggttcgtcgttcctatcgaatgtggctctgattaacccgtcatctataggcgatgctggttctggagattctggaggagatggattattatctggaagaatctctgttatttccttgttttcatgtatcgattgcgttgtaacattaagattgcgaaatgctctaaatttgggaggcttgaagtgttgtttgcaatctctacacgcgtgtctaactaatggaggttcatcagcagctctagtttgaatcatcatcggtgtagtattcctacttttacagttaggacacggtgtattgtatttctcgtcgagaacgttaaaataatcgttgtaactcacatcctttattttatctatattgtattctactcctttcttaatgcattttataccgaacaagagatagcgaaggaattctttttcggtaccgctagtacccttaatcatgtcacatagtgttttatattccaaatttgtggcaatggacggtttatttctatacgatagtttgtttctggaatcctttgagtattctataccaatattattctttgattcgaatttagtttcttcgatattagattttgtattacctatattcttgatgtagtactttgatgatttttccatggcccattctattaagtcttccacgctggtattatcatccacatattgtgatagtaactctcggatatcagtagcggctaccgccattgatgtttgttcatttgatgagtaactactactaatgaatacattttccatttataacacttatgtattaactttgatcatttatattttttcattattatgttgatattaacaaaagtgaatatatatgttaataattatggtgtggtgtgtacggccacaatttcataatgagtggaagtcagtgtcctatgatcaatgacgatctatttagagttactttgaaaagaatgcatccactcaatagtgaggagtcgagtatgaaaatagataagaagaggacaaagtttcagaatagagccaaaatggtaaaagaaataaatcagacaataagagcagcacaaactcattacgagacattgaaacaaggatacctaaaatttaagagaatgattagaactgctactctaaaagatatagcaccatctattccaaaaattcagaaattttataaactattctcggacatttcagccatcagcaaagcatcacagaatccgagtaagatggtatatgctctactgctttacatgtttcccaatttgtttggagatgaccatagattcattcgttatagaatgcatccaatgagcaaaatcaaacacaagatcttctccccgttcaaacttaatcttattagaatattagtggaagaaagattctataataatgaatgcagagattataaatggagaataattggaacacaagttgataaaatattgatagctgaatctgctaaatatacaatagatgcaaggtatcgcctaagacctatatatagaatcaagggagaatctgaagaagataccctcttcatcaaacagatggtagagaaatgtgtaacgtctcaggaattggtggagaaagtgttgaagatactgtttaaagatttgttcaagagtggagaatacaaagattacagatacgatgatgatgtagacaatggattcattggattggacaaactaaaattaaacattgttcacgatatagttgaaccatgtatgcctgttcgtaggccagtggctaaggtactgtgtaaagaaatggtaaataaatactttgagaatcctctacatatcattggtaagaatctccaagagtgcattgactttgttagtgagtaggcatttcatcttttcctttctcaatactattcaacttgttaaattaataatggatagtttaaaatagttattagtagtaataagatagtttaaaatagttattagtagtaataagatagtttaaaatagttattagtagtaataagatagtttaaaatagtataaaatagataagtatttactctcttctataaaaatggattttattcgtagaaagtatcttatatacacagtagaaaataatatagattttttaaaggatgatacattaagtaaagtaaacaattttaccctcaatcatgtattagctctcaagtatctagttagcaatttcccccaacatgttattactaaggatgtattagctaataccaatttttttgttttcatacatatggtacgatgttgtaaagtgtacgaagcggttttacgacacgcatttgatgcacccacgttgtacgttaaagcattgactaagaattatttatcgtttagtaacgcaatacaatcgtacaaggaaaccgttcataaactaacacaagatgaaaaatttttagaggtagccgaatacatggaagaattaggagaacttataggggtaaattatgacttagttcttaatccattatttcacggaggggaacccatcaaagatatggaaatcatttttttaaaactatttaagaaaacagacttcaaagttgttaaaaaattaagtgttataagattacttatttgggcatacctaagcaagaaagatacaggcatagagtttgcggataatgatagacaagatatatatactctatttcaacaaactggtagaatagtccatagcaatctaacagaaacgtttagagattatatctttcccggagataagactagctattgggtgtggttaaacgaaagtatagctaatgatgcggatatcgttcttaatagacccgccattaccatgtatgataaaattcttagttatatatactctgagataaaacagggacgcgttaataaaaacatgcttaagttagtttatatctttgagcctgaaaaagatatcagagaacttctgctagaaattatatatgatattcctggagatatcctatctattattgatgcaaaaaacgacgattggaaaaaatattttattagtttttacaaagctaattttatcaacggtaatacatttattagtgatagaacgtttaacgaggacttattcagagttgttgttcaaatagatcccgaatatttcgataatgaacgaattatgtctttattctctacgagtgctgcggacattaaacgatttgatgagttagatattaataacagttatatatctaatataatttatgaggtgaacgatataacattagatacaatggatgatatgaagaagtgtcaaatctttaacgaggatacatcgtattatgttaaggaatacaatacatacctgtttttgaacgagacggatcccatggtcatagagaacggaatactaaagaaactgtcatctataaaatccaagagtagacgactgaacttgtttagcaaaaacattttaaaatattatttagacggacaattggctcgtctaggtcttgtgttagatgattataagggagacttgttagttaaaattataaaccatctcaagtctgtggaggatgtatcagcattcgttagattttctacagataaaaaccctagtattcttccatcgctaatcaaaactattttagctagttataatatttccatcatcgtcctatttcaaaagtttttaagagataatctatatcatgtagaagaattcttggataaaagcatccatctaaccaagacggataagaaatatatacttcaattgataaggcacggcagatcatagaacaaaccaaatatacatattaaaaattcacacatttttgataaatgggaactgctgcaacaattcagactcccaccaaattaatgaataaagagaatgcagaaatgattttggaaaaaattgttgatcatatagttatgtatattagtaacgaatcaagtgatgaaaataatcctgaatatattgattttcgtaacagatacggagactatagatctctcattataaaaagtgatcacgagtttgtaaagctatgtaaagatcatgccgagaaaagttctccagaaacacaacaaatgataatcaaacacatctacgaacaatatcttattccggtatctgaagtactattaaaacctatgatgtccatgggtgacataattacatataacggatgtaaagacaatgaatggatgatagaacaactctctaccctaaactttaacaatctccgcacatggaactcatgtagcataggcaatgtaacgcgtctgttttatacattttttagttatctgatgaaagataaactaaatatataagtataatcataatcccattctaatactttaacctgatgtattatgtatcacctgcatcttattagaatattaacctaactaaaagacataacataaaaactcattacatagttgataaaaagcggtaggatataaatattatggctgccgccgttccgcgttttgacgacgtgtacaaaaatgcacaaagaagaattctagatcaagaaacattttttagtagaggtctaagtagaccgttaatgaaaaacacatatctatttgataattacgcgtatggatggataccagaaactgcaatttggagtagtagatacgcaaacctagatgctagtgactattatcccatttcgttgggattacttaaaaagtttgagtttctcatgtctctatataaaggtcctattcccgtatatgaagaaaaaataaatactgaattcattgctaatggatctttctccggtagatacgtatcatatcttagaaagttttctgcccttccaacaaacgagtttattagttttttattattgacctccatccctatctataatatcttattctggtttaaaaacacacagtttgatattactaaacacacattattcagatacgtctatacagataatgccaaacacctggcgttggctaggtatatgtatcaaacaggagactataagcctttgtttagtcgtctcaaagagaattatatatttaccggtcctgttccgataggaatcaaagatatagatcaccctaatcttagtagagcaagaagtccatccgattatgagacattagctaatattagtactatattgtactttaccaagtatgatccagtattaatgtttttattgttttacgtacctgggtattcaattactacaaaaattactccagccgtagaatatctaatggataaactgaatctaacaaagagcgacgtaaaactgttgtaaattattttatgcttcgtaaaatgtaggttttgaaccaaacattctttcaaagaatgagatgcataaaactttattatccaatagattgactatttcggacgtcaatcgtttaaagtaaacttcgtaaaatattctttgatcactgccgagtttaaaacttctatcgataattgtttcgtatgttttaatatttacaagttttttggtccatggtccattaggacaaatatatgcaaaataatatcgttctccaagttctatagtctctggattatttttattatattcagtaaccaaatacatattagggttatctgcggatttataatttgaatgatgcattcgactcaacataaacaattctagaggagacgacctactatcaaattcggatcgtaaatctgtttctaaagaacggagaatatctatacatacctgattagaattcatccgtccttcagacaacatctcagacagtctggtcttgtatatcttaatcatgttcttatgaaacttggaaacatctcttctagtttcactagtacctttattaattctctcaggtacagattttgaattcgacgatgccgagtatttcatcgttgtatatttcttcttcgattgcataattagattcttatatacagcctcaaactctattttaaaattattaaacaatactctactattaatcagtcgttctaactcctttgctatttctatggacttatcgacatcttgactgtctatctctgtaaacacggagtcggtatctccatacacgctacgaaaacgaaatctgtaatctataggcaacgatgttttcactatcggattaatatctctatcgtccatataaaatggattacttaatggattggcaaaccgtaacataccgttagataactctgctccatttagtaccgattctagatacaagatcattctacgtcctatggatgtgcaactcttagccgaagcgtatgagtatagagcactatttctaaatcccatcagtccatacaccgagttggctactatcttgtacgtatattgcatggaatcatagatggccttttcagttgaactggtagcctgttttaacatctttttatatctggctctctctgccaaaaatgttctcaatagtctaggaatggttccttctatcgatctatcgaaaattgctatttcagagatgaggttcggtagtctaggttcacaatgaaccgtaatatatctaggaggtggatatttctgaagtaagagctgattatttatttcttcttccaatctattggtactaacgacgacaccgactaatgtttccggagatagatttccaaagatacacacattaggatacagactgttataatcaaagattaatacattattactaaacattttttgttttggagcaaataccttaccgccttcgtatggaaacttttgttttgtttctgatctcactaagatggttttagtttccaacaatagctttaacagtggacccttgatgactgtactcgctctatattcgaataccattgattgaggaagcacatatgttgacgcacccgcatctgtttttgtttctactccgtaatactcccacaaatactgacacaagcaagcatcatgaatacagtatctagccatatctaaagctatgtttagattataatccttatacatctgtgctagatcaacgtcatcctttccgaaagataatttatacgtatcatttgttaaagtgggacacgatagaacgaccttgaatccattttcccaaatatctttatgaattactttacatataatatcatcatcaaccgtcacataattacccgtggttaaaacctttgcgaatgcagcggctttgcctttagcgtccgtagtatcgtcaccgatgaacgtcatttctctaactcctctatttaatactttgcccatgcaactgaacgcgttcttggatatagaatccaatttgtacgaatccaatttttcagacttttgaatgaatgaatacagatcgaaaaatatagttccattattgttattaacgtgaaacgtagtattggccatgccacctactcccttgtgactagactgatttctctcataaatacagagatgtacagcttcctttttgtctggagatctaaagataatcttctctccggttaataactctagacgattagtaatatatctcagatcaaagttatgtccgttaaaggtaacgatatagtcgaacgttagttccaacaattgtttagctatttgtagcaaaactatttcagaacacagaactagttctcgttcataatccatttccatcagtgactgtatcctcaaacatcctctatcgacggcttcttgtatttcctgttccgttaacatctcttcattaatgagcgtaaacaataatcgtttaccgcttaaatcgatataacagtaacttgtatgcgagattggattaataaatacagaaggaaatttcttatcaaagtgacactctatatctagaaataagtacgatcttggaatatcgaatctaggtatttctttagcgaaacagttacgtggatcgtcgcaatgataacatccattgttaatctttgtcaaatattgctcgtccaacgagtaacatccgtctggagatatcccgttagaaatataaaaccaactaatattgagaaattcatccatggtggcattttgtatgttgcgtttctttggctcttctatcaaccacatatctgcgacggagcattttctatctttaatatctaaattataacttatcgtctcatcaatgtctatagttctcatctttcccatcggtctcgcattaaatggaggaggagccaatgactgatatatttcgtccgtcactacgtaataaaagtaatgaggaaatcgtataaatacggtctcgccatttcgacatctggatttcagatataaaaatctgttttcaccccgactttcgaaccaattaatgcaccgaacatccatttctagaatttagaaatatattttcatttaaatgaatcccaaacattggggaagagccgtatggaccattatttttatagtactttctcaagcgggtttagacggcaacatagaagcgtgtaaacgaaaactatatactatagtcagcacgcttccatgtcctgcatgtagacggcacgcgactatcgctatagaggacaataatgtcatgtctagcgatgatctgaattatatttattattttttcatcagattatttaacaatttggcatctgataccaaatacgcaatcgatgtgtcaaaggttaaacctttataaacttaacccattataaaacttatgattagtcacgactgaaataacggcgtgattattttttggtataattctacacggcatagtttctgtgactatgaattcaacacccgttatcttagtgaaatctttaacaaacagcaagggttcgtcaaagacataaaactcattgtttacgatcgaaatagatcccctatcacacttaaaataaaaaatatccttatcctttaccaccaaataaaattctgattggtcaatgtgaatgtattcacttaacagttccacaaatttatttattaactccgaggcacatacatcgtcggtattttttatggcaaactttactcttccagcatccgtttctaaaaaaatattaacgagttccatttatatcgtccaatattattgaaatgacgttgatggacagatgatacaaataagaaggtacggtacctttgtccaccatctcctccaattcatgctctattttgtcattaactttaatgtgtgaaaacagtactccacatgcttccatgacagtgtgtaacactttggatacaaaatgtttgacattagtataattgtccaagactgtcaatctataatagatagtagctataatatattctatgatggtattgaagaagatgacaaccttggcatattgatcatttaacacagacatggtatcaacagatagcttgaatgaaagagaatcagtaattggaataagcgtcttctcgatggagtgtccgtataccaacatgtctgatattttgatgtattccattaaattatttagttttttctttttattctcgttaaacagcatttctgtcaatggaccccaacatcgttgaccgattaagttttgattgatttttccatgtaaggcgtatctagtcagatcgtatagcctatccaataatccatcgtctgtgcgtagatcacatcgtacactttttaattctctatagaagagcgacagacatctggagcaattacagacagcaatttctttattctctacagatgtaagatacttgaagacattcctatgatgatgcagaattttggataacacggtattgatggtatctgttaccataattcctttgatggctgatagtgtcagagcacaagatttccaatcttttgcaattttcagtaccattatctttgttttgatatctatatcagacagcatggtgcgtctaacaacacagggattaagacggaaagatgaaatgattctctcaacatcttcaatagataccttgctattttttctggcattatctatatgtgtgagaatatcctctagagaatcagaatcctttttgatgatagtggatctcaatgacatgggacgtctaaaccttcttattctatcacctgtttgcatggtgatttgtcttctttcttttatcatgatgtaatctctaaattcatcggcaaattgtctatatctaaaatcataatatgagatgtttacctctacaaatatctgttcgtccaatgttagagtatctacatcagtcttgtattccaaattaaacatggcaacggatttaattttatattcctctattaggtcctcgtcgacaataacagagtgcagataatcatttaatccgtcgtacatggttggaagatgctcgttgacaaaatctttaattgtcttgatgaaggtgggactatatctaacatcttgattaataaaatttataacattgtccataggatactttgtaactagttttatacacatctcttcatcggtaagtttagacagaatatcgtgaacaggtggtatattatattcatcagatatacgaagaacaatgttcaaatctagattgtttaatatattatatagatgtagtgtagctcctacaggaatatctttaactaagtcaatgatttcatcaaccgttagatctattttaaagttaatcatataggcattgatttttaaaaggtatgtagccttgactacattctcattaattaaccattccaagtcactgtgtgtaagaagattatattctatcataagcttgactacatttagtcccgacaccatcaaagaattcttatgatataaggaaacagcttttaggtactcatctactctacaagaattttggagagccttaatgatatcggtgacgtttattatttcaggaggaaagaacctaacattgagaatatcggaattaatagcttccagatacagtgattttggcaatagtccgtgtaatccataatccagtaacacgagctggtgcttgctagacaccttttcaatgtttaatttttttgaaataagctttgataaagccttcctcgcaaattccggatacatgaacatgtcgccgacatgattaagtattgttttttcagtattttatatttttctcaacaagttctcaataccccaatagatgatagaatatcacccaatgcgtccatgttgtctatttccaacaggtcgctatatccaccgatagaagttttcccaaaaaagattctaggaacagttctaccaccagtaatttgttcaaaatagtcacgcaattcattttcaggtctaaattctttaatatcgacaatttcatacgctcctcttttgaaactaaacttatttagaatatccagtgcgtttctacaaaaaggacatgtaaacttgacaaaaattgtcactttgttattggccaacctttgttgtacaaattcctcggccattttaatatttaagtgatataaaactatctcgacttatttaactctttagtcgagatatatggacgcagatagctatatgatagccaactacagaaggcgaacgctataaaaaacataattacgacgagcatttataaatatttttattcagcattacttgatatagtaatattaggcacagtcaaacattcaaccactctcgatacattaactctctcattttctttaacaaattctgcaatatcttcgtaaaaagattcttgaaactttttagaatatctatctactctagatgaaatagcgtttgtcaacatactatgtttcgtatacataaaggcgcccattttaacagtttctagtgacaaaatgctagcgatcctaggatcctttagaatcacatagattgacgattcgtctctcttagtaactctagtaaaataatcatacaatctagtacgcgaaataatattatccttgacttgaggagatctaaacaatctagttttgagaacatcgataagttcatcgggaatgacatacatactatctttaatagaactcttttcatccagttgaatggattcgtccttaaccaactgattaatgagatcttctattttatcattttccagatgatatgtatgtccattaaagttaaattgtgtagcgcttctttttagtctagcagccaatactttaacatcactaatatcgatatacaaaggagatgatttatcgatggtattaagaattcgtttttcgacatccgtcaaaaccaattcctttttgcctgtatcatccagtttgccatcctttgtaaagaaattattttccactagactattaataagactgataaggattcctccataattgcacaatccaaactttttaacaaaactagactttacaagatctacaggaattcgtacttcaggtttcttagcttgtgattttttcttttgcggacattttcttgtgaccaactcatctaccatttcattgattttagcagtgaaataagctttcaatgcacgggcactgatactattgaaaacgagttgatcttcaaattccgccatttaagttcaccaaacaacttttaaatacaaatatatcaatagtagtagaataagaactataaaaaaaataataattaaccaataccaaccccaacaaccggtattattagttgatgtgacagttttctcatcacttagaacagatttaacaatttctataaagtctgtcaaatcatcttccggagaacccataaatacaccaaatatagcggtgtacaacttatccatttatacattgaatattggcttttctttatcgctatcttcatcatattcatcttcaatatcaacaagtcccagattacgagccagatcttcttctacattttcagtcattgatacacgttcactatctccagagagtccgataacgttagccacaacttctctatcaatgattagtttcttgagcgcgaatgtaatttttgtttccgttccggatctatagaaaactacaggtgtaataattgccttggccaattgtctttctcttttactgagtgcttctagttcaccttctatagatctgagaatggatgattctcccgctgaaacatattctaccatagctccgtttattttgttaatgaagatagattcatccttaaatgttttctctgtaatagtttccaccgaaagactatgcaaagaatttggaatgcgttccttgtgcttaatgtttccatagacagcttctagaagttgatacaacataggactagccgcggtaacttttatttttagaaagtatccatcgcttctatcttgtttagatttatttttataaagtttagtctctccttccaacataataaacgtggaagtcatctgactagataaactatcagtaagttttatagagatagacgaacaattagcgtattgagaagcatttagtgtaacgtattcgatacattttgtattagatttactaatcgattttgcatactctataacacccgcacaagtctgtagagaatcagatgctgtaggtcttggcgaagtttcaactctcttcttgattaccttactcatgattaaacctaaataattgtactttgtaatataatgatatatattttcactttatctcatttgagaataaaaatgtttttggttaaccgctgcatgatgtacagatttcggaatcgcaaaccactggtggctttatcttatccttgtccaatgtgaattgaatgggagcggatgcgggtttcgtacgtagatagtacattcccgtttttagaccgagactccatccgtagaaatgcatactcgttagtttggaataactcggatctgctatatggatattcatagattgactttgatcgatgaaggctcccctgtctgcagccatttttatgatcgtcttttgtggaatttcccaaatagttttataaactcgcttaatatcttctggaaggtttgtattctgaatggatccaccatctgccataatcctattcttgatctcttcattccataattttctctcggttaaaactctaaggagatgcggattaactacttgaaattctccagacaatactctccgagtgtaaatattactggtatatggttccaccgattcattatttcccaaaatttgagcagttgatgccgttggcataggtgccaccaataaactatttctaagaccgtatgatctgattttatcttttagagattcccaatcccaaagatcagacgggacaacattccaaagatcatattgtagaataccgttactagcgtatgatcctgtgtatgtttcataaggtccttccttttcggctaattcacaactcgcctctaatgctccgtaataaatggtttcgaaaatcttcttattgagatcttgtgcttctaggctatcaaatggataatttaagagaataaacgcgtctgctaatccttgaacaccaataccgataggtctatgtctcttattagaaatttcagcttctggaataggataataattaatatctataattttattgagattcctgactattactttgaccacatcctttagtttgagaaaatcaaatcgtccatctattacaaacatgttcaacgcgacagatgccagattacaaacggctacctcattagcatccgcatattgtattatttcagtgcagaggttactacacttaatggttcctaaattttgttgattactctttttgttacacgcatccttataaagaatgaacggagtaccagtttcaatctgagattctataatcgctttccagacgactcgagcctttattatagacttgtatctcttttctctttcgtattgtgtatataatcgttcgaactcgtctccccaaacatcgtctaatccaggacattcgtcaggacacatcaacgaccactctccatcatcctttactcgtttcataaagagatcaggaatccaaagagctataaatagatctctggttctatgctcctcgtttcctgtattctttttaagatcgaggaacgccataatatcagaatgccacggttccaagtatatggccataactcccggtcgtttgtttcctccctgatctatgtatctagcggtgttattataaactctcaacattggaataataccattggatgtaccattggtcccggagatatagcttccactggcacgaatattactaattgatagacctattccccctgccattttagagattaatgcgcatcgttttaacgtatcatagatgccctctatgctatcatcaatcatgttaagtagaaaacagctagacatttggtgacgactagttcccgcattaaataaggtaggagaagcgtgcgtaaaccatttttcagacagtagattgtacgtctcaatagctgattctatatcccattgatgaattcctaccgcgacacgcattaacatgtgctgaggtctttcaacgatcttgttatttattttcaacaagtaagatttttccaaagttttaaaaccaaaatagttgtatgaaaagtctcgttcgtaaataataaccgagttgagtttatccttatatttgttaactacatccatggtgatacttgaaataatcggagaatgtttcccatttttaggattaacatagttgaataaatcctccatcacttcactaaatagtttttttgtttccttgtgtagatttgatacggctattctggcggctaaaatggcataatctggatgttgtgtagtacaagtggctgctatttcggctgccagagtgtccaattctaccgttgttactccattatatattccttggataaccttcatagctattttaataggatctatatgatcagtgtttaagccataacataattttctaatacgagacgtgattttatcaaacatgacattttccttgtatccatttcgtttaatgacaaacatttttgtcggtgtagtaaaaaaaattatttaacttttcattaatagggatttgacgtatgtagcgtacaaaatgattgttcctggtatatagataaagagtcctatatatttgaaaatcgttacggctcgattaaactttaatgattgcattgtgaatatatcattaggatttaactccttgactatcagggcggcaccagaaatcaccatcaaaagcattaatacagttatgcctatcgcagttagaacggttatagcatccaccatttatatctaaaaattagatcaaagaatatgtgacaaagtcctagttgtatattgagaattgacgaaacaatgtttcttacatattttttttttattagtaaccgacttaatagtaggaactggaaaactagacttgattattctataagtatagatacccttccagataatgttctctttgataaaagttccagaaaatgtagaattttttaaaaagttatcttttgctattaccaagattgtggttagacgcttattattaatatgagtaatgaaatccacaccgcctctagatatagcctttatttccacattagatggtaaatccaatagtgaaactatctttttaggaatgtatggactcgcgtttagaggagtgaacgtctttggagtaggaaaggatgattcgtcaaacgaataaacaatttcacaaatggatgttaatgtgttagtgggaaatttcttgacgctagtggaattgaaaattctaacggatgatgttctacctatttcatccgataacatgttaatttccgataccaacggttttaatatttcgatgatatacggtagtctctctttcggacttatatagcttattccacaatacgagtcattatatactccaaaaaacaaaataactagtataaaatctgtatcgaatgggaaaaatgaaattatcgacataggtatagaatctggaacattgaacgtattaatacttaattctttttccgtagtaagaaccgataggttattgacattgtatggttttaaatattctataacttgagacttgatagatattagtgatgaattgaaaattatttttatcaccacgtgtgtttcaggatcgtcgtcgatacccgttaaccaaccgaatggggtaaaataaatatcattaatatatgctctagatattagtatttttatcaatcctttgattatcatcttctcgtatgcgaatgattccatgatcaagagtgacttgagaacatcctccggagtattaatgggcttagtaaacagtccatcgttgcaataataaaagttatccaagttaaaggatatgatgcattcgtttaaagatatcacctcatccaacggagacaatttttttgtaggttttagagacttcgaagctacttgtttaacaaagttattcatcgtcgtctactattctatttaattttgtagttaatttatcacatatcacattaattgactttttggtccacttttccatacgtttatattcttttaatcctacgttatccgtttccgttacatccagtgatagatcttgcaagttaaatagaatgctcttaaataatgtcattttcttgtccgctaaaaatttaaagaatgtataaacttttttcaaagatttgaaacttttaggtggagttctagtacacaatatcataaacaaactaataaacatcccgcattcagattccaacagttgattaacttccacattaatacagcctattttcgcaccaaatgtacattcgaaaaatctgaataaaacatcaatgtcgcaatttgtattgtccaatacagaatgtctatgattcgtgttaaaaccatcggagaaggaatagaaataaaaattattatagtgatgaaattcagttggaatattgcctccggagtcataaaaggatactaaacattgttttttatcataaattacacatttccaatgagacaaataacaaaatccaaacattacaaatctagaggtagaacttttaattttgtctttaagtatatacgataagatatgtttattcataaacgcgtcaaatttttcatgaatcgctaatgagtttaagaatctcatgtcaaattgtcctatataatccacttcagatccataagcaaactgagagactaagttcttaatacttctattgctcatccaggctcctctctctggctctatctttatcttgacgaccttcggattttcaccagtatgtattcctttacgtgataaatcatcgattttcaaatccatttgtgagaagtctatcgccttagataccttttctcgtagtcgaggtttaaagaaatacgctaacggtatactagtaggtaactcaaagacatcatatatagaatggtagcgcatctttaactcgtcagttagctctttcttttgatcgagttcgtcgctactattgggtctactcaggtgcccagactctactagttccaacatcataccgataggtatacaagacactctgccagcggttgtagatttatcatatttctctactacatatccgttacaatttgttaagaatttagatacatctatattgctacataatccagctagtgaatatatatgacataataaattggtaaatcctagttctggtattttactaattactaaatctgtatatctatccatttatcatggaaaagaatttacccgatatcttcttttttccaaactgcgttaatgtattctcttacaaatattcacaagatgaattcagtaacatgagcaaaacggaacgtgcaagtttctcattggcagtgtttccagtgataaaacatagatggcataacgcacacgttgtaaaacataaaggaatatacaaagttagtgcagaagcacgtggagaaaaagtatctcctccatcactaggaaaacctgtttacataaacctaactacgaggcaatatatatacagtgagtatgcaataagctttgaatgttatagttttctaaaatgtataacaaatacagaaatcaattcgttcgatgattatatattaagaggactattggaagcgggtaatagtttacagatattttccaattctgtgggtaaacggatagatactgtaggtgtactagggaacaagtatccgtttagtaaaattccattggcctcattaactccgaaagcacaacgagagatattttcagcgtggatttctcatagacctgtagttttaactggaggaaccggagtgggtaagacgtcacaggtacccaagttattgctttggtttaattatttatttgggggattctctactctagataaaatcactgactttcacgaaagaccagtcattctatctcttcctaggatagctttagttagattgcatagcaataccattttaaaatcattgggatttaaggtactaaatggatctcctatttctttacggtacggatctataccggaagaattaataaacaaacaaccaaaaaaatatggaattgtattttctacccataagttatctctaacaaaactatttagttatggcactcttattatagacgaagttcatgagcatgatcaaataggagatattattatagcagtagcgagaaagcatcatacgaaaatagattctatgtttttaatgactgccacattagaggatgacagagaacgtctaaaagtatttttacccaatcccgcatttatacatattcctggagatacactgtttaaaattagcgaggtatttattcataataagataaatccatcttccagaatggcatacatagaagaagaaaagagaaatttagttactgctatacagatgtatactcctcctgatggatcatccggcatagtcttcgtggcatccgttgctcaatgtcatgaatataaatcatatttagaaaagagattgccgtacgatatgtatattattcatggtaaggtcttagatatagacgaaatattagagaaagtgtattcatcacctaacgtatcgataattatttctactccttatttggaatccagcgttactatacgcaatgttacacacatttatgatatgggtagagtttttgttcctgctccttttggaggatcgcaacaatttatttctaaatctatgagagatcaacgaaaaggaagagtaggaagagttaatcctgggacatacgtctatttctatgatctgtcatacatgaagtctatacagcgaatagattcagaatttctacataattatatattatacgctaataagtttaatctaacactccccgaagatttgtttataattcctacaaatttggatgttctgtggcgtacaaaggaatatatagactcgttcgatattagtacagaaacatggaataaattattatccaattattatatgaagataatagagtatgcgaaactttatgtactaagtcctattctcgctgaggagttggataactttgagagaactggagaattaactagtacggtaaaagaagccattttatctctaaatttacgaattaagattttaaattttaaacataaagatgaggatacgtatatacacttttgtagagtattatttggtgtctataacggaacaaacgctactatatattatcatcgccctctaactggatatatgaatatgatttcagatactatatttgttcctgtagataataactaaaaatcaaactctaattaccacatctttttttagagatgaaaaattttccacatctccttttgtagacacgactaaacattttgcagaaaaacgtttattattatttagataatcgtatacttcatcagtgtagatagtaaatgtgaacagataaaaggtattcttgctcaataaattggtaaattccatagaatatattaatcctttcttcttgagatcccacatcatttcaaccaaagacgttttatccaatgatttacctcgtactataccacatacaaaactagattttgcagtgacgtcgtacctggtattcctaccaaacaaaattttacttttagttcttttagaaaattctaaggtagaatctctatttgccaatatgtcatctatggaattaccactagcaaaaaatgatagaaatatatattgatacatcgcagctggttttgatctactatactttaaaaacgaatcagattccataatggcctgtatatcatccgccgaaaaactatgttttacacgtattccttcggcatttctttttaatgatatatcttgtttagataatgataaagttatcatgtccatgagagacgcgtctccgtatcgtataaatatttcattagatgttagacgcttcattaggggtatacttctataaggtttcttaatcagtccatcattggttgcgtcaagaactactatcggatgttgttgggtatctctagtgttacacatggccttactaaagtttgggtaaataactatgatatctctattaattatagatgcatatatttcattcgtcaaggatattagtatcgacttgctatcgtcattaatacgtgtaatgtaatcatataaatcatgtgatagccaaggaaaattcaaatagatgttcatcatataatcgtcgctataattcatattaatactttgacattgactaatttgtaatatagcctcgccacgaagaaagctctcgtattcagtttcatcgataaaggataccgttaaatataactggttgccgatagtctcatagtctattaagtggtaagtttcgtacaaatacagaatccctaaaatattatctaatgttggattaatctttaccataactgtataaaatggagacggagtcataactattttaccgtttgtacttactggaatatatgaaggaataatctccgggcatgctggtaaagacccaaatgtctgtttgaagaaatccaatgttccaggtcctaatctcttgacaaaaattacgatattcgatcccgatatcctttgcattctatttaccagcatatcacgaactatattaagattatctatcatgtctattctcccaccgttatataaatcgcctccgctaagaaacgttagtatatccatacaatggaatacctcatttctaaaatagtattcgttttctaattctttaatgtgaaatcgtatactagaaagggaaaaattatctttgagttttccgttagaaaagaaccacgaaactaatgttctgattgcgtctgactccgtcgctgaattaatggatttacaccaaaaactcatataacttctagatgtagaagcattcgctaaaaaattagtagaatcaaaggatataagtagatgttccaacaagtgagcaattcccaagatttcatctatatcattctcgaatccgaaattagaaattcccaagtagatatcctttttcatccgatcattgatgaaaatacgaactttattcggtaagacgatcatttactaaggagtaaaataggaagtaatgttcgtatatcgttatcgtcgtataaattaaaggtgtgttttttgccattaagtgacattataattttaccaatattggaattataatataggtgtatttgagcactagaaacggtcgatgcatcggtaaatatagctgtatctaatgttctagtcggtatttcatcatttcgctgtctaataatagcgttttctctatctgtttccagcacagctgcctgaagtttattggtaggataatatgtaaaataataagaaatacatacgaataacaaaaataaaataagatataataaagatgccatttagagatctaattttgttcaacttgtccaaattcctacttacagaagatgaggaatcgttggagatagtatcttccttatgtagaggatttgaaatatcttacgatgacttaatatcgtactttccagataggaaataccataaatatatttctaaggtatttgaacatgtagatttatcggaggaattaagtatggaattccatgatacaactctgagagatttagtctatcttagattgtacaagtattccaagtatatacggccgtgttataaattaggagataatctaaaaggtatagttgttataaaggacagaaatatatatattagagaagcaaatgatgacttgatagaatatctcctcaaggaatacactcctcagatttatacatattctaatgagcgcgtccccatagctggttcaaaattaattctttgcggattttctcaagttacatttatggcgtatacaacgtcgcatataacaacaaataaaaaggtagatgttctcgtttccaaaaaatgtatagatgaactagtcgatccaataaattatcaaatacttcaaaatttatttgataaaggaagtggaacaataaacaaaatactcaggaagatattttattcggtaacaggtggccaaactccataggtagctttttctatttcggattttagaatttccaaattcaccagcgatttatcggttttggtgaaatccaaggatttattaatgtccacaaatgccatttgttttgtctgtggattgtatttgaaaatggaaacgatgtagttagatagatgcgctgcaaagtttcctattagggttccgcgctttacgtcacccaacatacttgaagcaccatcctttaaaaaaaatgataagatatcaacatggagtatatcatactcggattttaattcttctactgcctcactgacattttcacaaatactacaatacggtttaccgaaaataatcagtacgttcttcatttatgggtatcaaaaacttaaaatcgttactgctggaaaataaatcactgacgatattagatgataatttatacaaagtatacaatggaatatttgtggatacaatgagtatttatatagccgtcgccaattgtgtcagaaacttagaagagttaactactgtattcataaaatacgtaaacggatgggtaaaaaagggagggcatgtaaccctttttatcgatagaggaagtataaaaattaaacaagacgttagagacaagagacgtaaatattctaaattaaccaaggacagaaaaatgctagaattagaaaagtatacatcagaaatacaaaatgttaccggatttatggaagaagaaataaaggcagaaatgcaattaaaaatcgataaactcacatttcaaatatatttatctgattctgataacataaaaatatcattgaatgagatactaacacatttcaacaataatgagaatgttacattattttattgtgatgaacgagacgcagaattcgttatgtgtctcgaggctaaaacacatttctctaccacaggagaatggccgttgataataagtaccgatcaggatactatgctattcgcgtctgctgataatcatcccaagatgataaaaaacttaactcatctgtttaaatttgttccctcggcagaggataactatttagcaaaattaacggcgttagtgaatggatgtgatttctttcctggactctatggggcatctataacacccaccaacttaaacaaaatacaattgtttagcgattttacaatcgataatatagtcactagtttggcaattaaaaattattatagaaagactaactctaccgtagacgtgcgtaatattgttacgtttataaatgattacgctaatttagacgatgtctactcgtatgttcctccttgtcaatgcactgttcaagaatttatattctccgcattagatgaaaaatggaacgattttaaatcatcttatttagagagcgtgccattaccctgtcaattaatgtacgcgttagaaccacgtaaggagattgatgtttcagaagttaaaactttatcatcttatatagatttcgaaaatactaaattagatatcgatgttataaaatctatatcctcgatttttggatattctaacgaaaactgtaacacgatagtgttcggcatctataaggataatttactactgagtataaatagttcattttactttaacgatagtctgttaataaccaatactaaaagtgataatataataaatataggttactagattaaaaatggtgttccaactcgtctgctctacatgtggcaaagatatttctcatgaacgatataaattgattatacgaaaaaaatcattaaaggatgtactagtcagtgtaaagaacgaatgttgtaggttaaaattatctacacaaatagaacctcaacgtaacttaacagtgcaacctctattggatataaactaatatggatatggatccggttaattttatcaagacatatgcgcctagaggttctattatttttattaattatgccatatcattaactagtcatttgaatccatcgatagaaaaacatgtgggtatttattatggtacgttattatcggaacacctggtagttgaatcgacctatagaaaaggagttagaatagtcccattggatagtttttttgaaggatatattagtgcaaaagtatacatgttagagaatattcaagttatgaaaatagcagctgatacgtcattaactttactgggtattccatatggattcggtcatgatagaatgtattgttttaaattggtagctgaatgttataaaaatgccggtgttgatatatcgtctacacgaatattgggcaaagatatttttttgagccaaaacttcacagatgataatagatggataaagatatatgattctaataatttaacactttggcaaattgattaccttaaagggtgagttaatatgcataactactcctccgttattttttccctcgttctttttcttaacgttgtttgccatcactctcataatgtaaagatattctaaaatggtaaacttttgcatatcggacgcagaaattggtataaatgatgtaattgtattatttcccgtcaatggactagtcacggctccatcagttttatatcctttagagtatttctcactagtgtctagcattctagagcattccatgatctgtttatcgttgatattggccggaaagatagattttttattttttattatattactattggcaattgtagatataacttctggtaaatatttttctaccttttcaatctcttctattttcaagccggctatatattctgctatattgttgctagtatcaataccttttctggctaagaagtcatatgtggtattcactatatcagttttaactggtagttccattagcctttccacttctgcagaataatcagaaattggttctttaccagaaaatccagctactataataggctcaccgatgatcattggcaaaatcctatattgtaccagattaatgagagcatatttcatttccaataattctgctagttcttgagacattgatttatttgaggaatctagttggttctctagatactctaccatttctgccgcatacaataacttgttagataaaatcaatgttatcaaagtgtttaacgtggctagaatagtgggtttgcacgtattaaagaatgcggtagtatgcgtaaaccgttttaacgaattatatagtctccagaaatctgtggcgttacatacgtgagccgaatgacatcgaagattgtccaatatttttaatagctgctctttgtccattatttctatatttgactcgcaacaattgtagataccattaatcaccgattcttttttcgatgccggacaatagcacaattgtttagctttggactctatgtattcagaattaatagatatatctctcaatacagattgcactatacattttgaaactatgtcaaaaattgtagaacgacgctgttctgcagccatttaactttaaataatttacaaaaatttaaaatgagcatccgtataaaaatcgataaactgcgccaaattgtggcatatttttcagagttcagtgaagaagtgtctataaatgtagactcgacggatgagttaatgtatatttttgccgccttgggcggatctgtaaacatttgggctattatacctctcagtgcatcagtgttctaccgtggagccgaaaacattgtgtttaatcttccggtgtccaaggtaaaatcgtgtttgtgtagttttcacaatgatgccatcatagatatagaacccgatctggaaaataatctagtaaaactttccagttatcatgtagtaagtgtcgattgtaataaggaactgatgcctattaggacagatactactatttgtctaagtatagatcaaaagaaatcttacgtgtttaattttcacaagtatgaagaaaaatgttgtggtagaaccgtcattcatctagaatggttgttgggctttatcaagtgtattagtcagcatcagcatttggctattatgtttaaagatgacaatattattatgaggactcctggtaatactgatgcattttccagggaatattctatgactgaatgttctcaagaacttcaaaagttttctttcaaaatagctatctcgtctctcaacaaactacgaggattcaaaaagagagtcaatgtttttgaaactagaatcgtaatggataatgacgataacattctaggaatgttgttttctgacagagttcaatcctttaagattaacatctttatggcgtttttagactaatactttcaacgagataaatatgggtggtggagtaagcgttgcgctccctaaacgggatccgcctccgggagtacccactgacgaaatgttattaaacgtggataaaatgcatgacgtgatagctcctgctaagcttttagaatatgtgcatataggaccgctagcaaaagataaagaggataaagtaaagaaaagatatccagagtttagattagtcagcacaggacccggtaatctttcggcattattaagacaatcgtataatggaaccgcacccaattgctgtcgcacttttaaccgtactcattattggaagaaggatggaaagatatccgataagtatgaagatggtgcagtattagaatcgtgttggcccgacgtccacgacactggaaaatgcgatgttgatttattcgactggtgtcagggggatacgttcgatagaaacatatgccatcaatggatcggttcagcatttaataggagtgatagaacggcagagggtcaacaatcgttaataaatctgtacaataagatgcaaacattatgtactaaagatgctagtgtgccaatatgtgaatcatttttgcatcatttacgcgcacacaatacagaagatagccaagagatgatcgactatattttaagacaacagtccgcagattttaagcagaaatatatgagatgtagttatcccaccagagataagttagaagagtcactaaaatatgcggaacctcgagaatgttgggatccagagtgttcgaatgccaatgttaatttcttgctaacacgtaattataataatttagggctatgcaatattgtacgatgtaataccagcgtgaacaacttacagatggataaaacttcctcattaagattatcctgtggattaagcaatagtgatagattttctactgttcccgtcaatagagcaaaagtagttcaacataatattaaacattcgttcgacctaaaattgcatttgatcagtttattatctctcttggtaatatggatactaattgtagctatttaaatgggcgccgcggcaagcatacaaacgacggtgaatacactcagcgaacgtatctcgtctaaattagaacaagaagcgaacgctagtgctcaaacaaaatgtgatatagaaattggaaatttttatatccgacaaaaccatggatgtaacctcactgttaaaaatatgtgctccgcggacgcggatgctcagttggatgctgtgttatcagccgctacagaaacatatagtagtttaacaccggaacaaaaagcatacgtacctgctatgtttactgccgcgttaaacattcaaacgagtgtaaacactgttgttagagattttgaaaattatgtgaagcagacttgtaattctagcgcggtcgtcgataacaaattaaagatacaaaacgtaattatagatgaatgttatggagccccaggatcaccaacaaatttggaatttattaatacaggatctagcaaaggaaattgtgccattaaggcgttgatgcaattgacgactaaggccactactcaaatagcacctagacaagttgctggttcaggagttcaattttatatgatagttatcggtgttataatattggcagcgttgtttatgtactatgccaagcgtatgctattcacatccaccaatgataaaatcaaacttattttagcaaataaggaaaacgtccattggactacttacatggacacattctttagaacttctccgatggttatcgctaccacggatatacaaaactgaaaatatattgataatattttaatagattaacatggaagttatcgctgatcgtctagacgatatagtggaacaaaatatagcggatgaaaaatttgtagattttgttatacacggtctactagaacatcaatgtccctccatacttcggccattacttaggttgttgattgatatactattatttgttatagtaatttatatttttacggtacgtctggtacgtagaaattatcaaatgttgttggtgttggtggcgctagtcatcgcgttaactattttttattactttatactataatagtactagactgacttctaacaaacatctcacctgccataaataaattcttgatattaaagtcttctatttctaacactattccatctgtggaaaataatactctgacattatcgctaattgacacatcggtgagtgatatgcctataaagtaataatcttctttgggcacatataccagtgtaccaggttctaacaacctatttactggtgctccagtagcatactttttctttaccttaagaatatccatcgtttgcttagtcaatagcgataggtgattttttatcaaccactcgaaaaagtaattggagtgttcatatcctctacgggctattgtctcatgtccgtgtatgaaatttaagtaacacgactgtggtagatttgttctatagagccggttgccgcaaatagatagaactaccaatacatctgtacaaatgttaaacattaattgattaacagaaaaaacaatgttcgttctgggaatagaaaccagatcaaaacaaaattcgttagaatatatgccacgtttatacattgaatataaaataactacagtttgaaaaataacagtatcatttaaacatttaacttgcggggttaatctcacaactttactgtttttgaactgttcaaaatatagcatagatccatgagaaatacgtttagccgcctttaatagaggaaatcctaccgcctttctggatctcaccaacgacgatagttctgaccagcaactcatttcttcatcatccacctgttttaacatataataggcaggagatagatatccgtcattgcaatattccttctcgtaggcacacaatctaatattgataaaatctccattctcttctctgcatttattatcttgtctcggtggctgattaggctgtggtcttggtttaggccttggtctatcgttgttgaatctattttgatcattaaatctttcatttcttcctggtatatttctatcacctcgtttggttggatttttgtatatattatcgtttgtaacatcggtacgggtattcatttatcacaaaaaaaacttctctaaatgagtctactgctagaaaacctcatcgaagaagataccatattttttgcaggaagtatatctgagtatgatgatttacaaatggttattgccggcgcaaaatccaaatttccaagatctatgctttctatttttaatatagtacctagaacgatgtcaaaatatgagttggagttgattcataacgagaatatcacaggagcaatgtttaccacaatgtataatataagaaacaatttgggtctaggcgatgataaactaactattgaagccattgaaaactatttcttggatcctaacaatgaggttatgcctcttatcattaataatacggatatgactgccgtcattcctaaaaaaagtggtaggagaaagaataagaacatggttatcttccgtcaaggatcatcacctatcttgtgtattttcgaaactcgtaaaaagattaatatttataaagaaaatatggaatccgcgtcgactgagtatacacctatcggagacaacaaggctttgatatctaaatatgcaggaattaatatcctgaatgtgtattctccttccacatccatgagattgaatgccatttacggattcaccaataaaaataaactagagaaacttagcactaataaggaactagaatcgtatagttctagccctcttcaagaacccattaggttaaatgattttctgggactattggaatgtgttaaaaagaatattcctctaacagatattccgacaaaggattgattactataaatggagaatgttcctaatgtatactttaatcctgtgtttatagagcccacgtttaaacattctttattaagcgtttataaacacagattaatagttttatttgaagtattcgttgtattcattctaatatatgtattttttagatctgaattaaatatgttcttcatgcctaaacgaaaaatacccgatcctattgatagattacgccgtgctaatttagcgtgtgaagacgataaattaatgatctatggattaccatggatgacaactcaaacatctgcgttatccataaatagtaaaccgatagtgtataaagattgtacaaagcttttgcgatcaataaatggatcacaaccagtatctcttaacgatgttcttcgcagatgatgattcattttttaagtatttggctagtcaagatgatgaatcttcattatctgatatattgcaaatcactcaatatctagactttctgttattattattgatccaatcaaaaaataaattagaggctgtgggtcattgttatgaatctctttcagaggaatacagacaattgacaaaattcacagactctcaagattttaaaaaactgtttaacaaggttcctattgttacagatggaagggtcaaactgaataaaggatatttgttcgactttgttattagtttgatgcgattcaaaaaagaatcagctctagctaccaccgcaatagatcctgttagatacatagatcctcgtcgcgatatcgcattttctaacgtgatggatatattaaagtcgaataaagtgaacaaataattaattctttattgtcatcatgaacggcggacatattcagttgataatcggtcccatgttttcaggtaaaagtacagaattgattagacgagttagacgttatcaaatagctcaatataaatgcgtgactataaaatattctaacgataatagatacggaacgggactatggacgcatgataagaataattttgcagcattggaagcaactaaactatacgatgtcttggaatcaattacagatttctccgtgataggtatcgatgaaggacagttctttccagacattgttgaattctgtgagcgtatggcaaacgaaggaaaaatagttatagtagccgcacttgatgggacatttcaacgtaaaccgtttaataatatcttgaatcttattccattatctgaaatggtggtaaaactaactgctgtgtgtatgaaatgctttaaggaagcttccttttctaaacgattaggtgcagaaaccgagatagagataatcggaggtaatgaaatgtatcaatcggtgtgtagaaagtgttacatcgactcataatattatatatttttatctaaaaaactaaaaataaacattgattaaattttaatataatacttaaaaatggatgttgtgtcgttggataaaccgtttatgtattttgaggaaattgataatgagttagattacgaaccagaaagtgcaaatgaggtcgcgaaaaaactgccgtatcaaggacagttaaaactattactaggagaattattctttcttagtaagttacagcgacacggtatattagatggtgccaccgtagtgtatataggatctgctcccggtacacatatacgttatttgagagatcatttctataatttaggagtgattatcaaatggatgctaatcgacggccgccatcatgatcctattttaaatggattacgtgacgtgactcttgtgactcggttcgttgatgaggaatatctacgaaccatcaaaaaacaactgcatccttctaagattattttaatttctgatgtgagatccaaacgaggaggaaatgaacctagtactgcggatttactaagtaattacgctctacaaaatgtcatgattagtattttaaaccccgtggcgtctagtcttaaatggagatgcccgtttccagatcaatggatcaaggacttttatattccacacggtaataaaatgttacaaccttttgctccttcatattcagctgaaatgagattattaagtatttataccggtgagaacatgagactgactcgagttaccaaatcagacgctgtaaattatgaaaaaaagatgtactaccttaataagatcgtccgtaacaaagtagttgttaactttgattatcctaatcaggaatatgactattttcacatgtactttatgctgaggaccgtatactgcaataaaacatttcctactactaaagcaaaggtactgtttctacaacaatctatatttcgtttcttaaatattccaacaacatcaactgaaaaagttagtcatgaaccaatacaacgtaaaatatctagcaaagattctgtgtctaaaaacagaaatagcaagagatccgtacgcggtaataaatagaaacgtgctactgagatatactaccgatatagagtataatgatttagttactttaataaccgttagacataaaattgattctatgaaaactgtgtttcaggtatttaacgaatcatctataaattatactccggttgatgatgattatggagaaccaatcattataacatcgtatcttcaaaaaggtcataacaagtttcctgtaaattttctatacatagatgtggtaatatctgacttatttcctagctttgttagactagatactacagaaactaatatagttaatagtgtactacaaacaggcgatggtaaaaagactcttcgtcttcccaaaatgttagagacggaaatagttgtcaagattctctatcgtcctaatataccattaaaaattgttagatttttccgcaataacatggtaactggagtagagatagcagatagatctgttatttcagtcgctgattaatcaattaatagagatgagataagaacattataataatcaataatatatcttatatcttgtttagaaaaatgccaatattaaaatagctaacgctagtaatccaatcggaagccatttgatatctataatagggtatctaatttcctgattcagatagcggacagctatattctcggtagctactcgtttggaatcacaaacattatttacatctaatttactatctgtaatggaaacgtttcccaatgaaatggtacaatccgatacattgcatcttgatatatttttttttaaagaggctggtaacaacgcatcgcttcgtttacatggctcgtaccaacaataatagggtaatcttgtatctattcctatccgtactatgcttttatcaggatgaatacatttacatcgtatatcgtctttgttagcatcgcagaatgcataaatttgctcgtccgtcatgataaaaatttaaagtgtaaatataactattatttttatagttgtaataaaaagggaaatttgattgtataccttcggttctttaaaagaaactgacttgataaaaatggctgtaatctctaaggttacgtatagtctatatgatcaaaaagagattaatgctacagatattatcattagtcatgttaaaaatgacgacgatatcggtaccgttaaagatggtagactaggtgctatggatggggcattatgtaagacttgtgggaaaacggaattggaatgtttcggtcactggggtaaagtaagtatttataaaactcatatagttaagcctgaatttatttcagaaattattcgtttactgaatcatatatgtattcactgcggattattgcgttcacgagaaccgtattccgacgatattaacctaaaagagttatcgggacacgctcttaggagattaaaggataaaatattatccaagaaaaagtcatgttggaacagcgaatgtatgcaaccgtatcaaaaaattactttttcaaagaaaaaggtttgtttcgtcaacaagttggatgatattaacgttcctaattctctcatctatcaaaagttaatttctattcatgaaaagttttggccattattagaaattcatcaatatccagctaacttattttatacagactactttcccatccctccgttgattattagaccggctattagtttttggatagatagtatacccaaagagaccaatgaattaacttacttattaggtatgatcgttaagaattgtaacttgaatgctgatgaacaggttatccagaaggcggtaatagaatacgatgatattaaaattatttctaataatactaccagtatcaatttatcatatatcacctccggcaaaaataatatgattagaagttatatcgtcgccagacgaaaagatcaaacggctagatcggtaatcggtcccagtacagcaatcaccattaatgaggtaggaatgcccgcatatattagaaatacacttacagaaaagatatttgttaatgcctttacagtggataaagttaaacaactattagcgtcgaaccaagttaaattttactttaataaacgattaaaccaattaacaagaatacgccaaggaaagtttatcaaaaataaaatacatttattgcctggtgattgggtagaagtagctgttcaagaatatacaagtattatttttggaagacagccgtctctacatagatacaacgtcatcgcttcgtctatcagagctaccgaaggagatactatcaaaatatctcccggaattgccaactctcaaaatgctgatttcgacggagatgaagaatggatgatattggagcaaaatcctaaagctgtagttgaacaaagtattcttatgtatccgacgacgttactcaaacacgatattcatggagcccccgtttatggatctattcaagatgaaatcgtggcagcgtattcattgtttaggatacaagatctttgtttagatgaagtattgaacatcttggggaaatatggaagagagttcgatcctaaaggtaaatgtaaattcagcggtaaagatatctatacttacttgataggtgaaaagattaattatccgggtctcttaaaggatggtgaaattattgcaaacgacgtagatagtaattttgttgtggctatgcggcatctgtcattggctggactcttatccgatcataagtcgaacgtggaaggtatcaactttattatcaagtcatcttatgtttttaagagatatctagctatatacggatttggtgtaacgttcaaagatctgaggccaaattcgacgttcactaataaattggaggccatcaacgtagaaaaaatagaacttatcaaagacgcatatgccaaatatctaaaagatgtaagagacgggaaaatagttccattatctaaagctttagaggcggactatgtggaatccatgttatccaacctgacaaatcttaatatcagagagatagaagaacatatgagacaaacgctgatagatgatccagataataatctcctgaaaatggccaaagcgggttataaagtaaatcccacagaactaatgtatattctaggtacttatggacaacagaggattgatggtgaaccagcagagactcgagtattgggtagagtcttaccttactatcttccagactctaaggatccagaaggaagaggttatattcttaattctttaacaaaaggattaacgggttctcaatattacttttcgatgttggttgccagatctcaatctactgatatcgtctgtgaaacatcacgtaccggaacactagctagaaaaatcattaaaaagatggaggatatggtggtcgacggatacggacaagtagttataggtaatacgctcatcaagtacgccgctaattataccaaaattctaggctcagtatgtaaacctgtagatcttatctatccagatgagtccatgacttggtatttggaaatcagtgccttgtggaacaaaataaaacagggattcgtttactctcagaaacaaaaacttgcaaagaagacattggcaccgtttaatttcctagtatttgtcaaacccaccactgaggataatgccattaaggtcaaggatctgtatgatatgattcataacgtcattgatgatgtgagagagaaatacttctttacggtatctaatatagattttatggagtatatattcttgacgcatcttaatccttctagaattagaatcacaaaagaaacggctatcactatctttgaaaagttctatgaaaaactcaattatactctaggtggtggaactcctattggaattatttctgcacaggtattgtctgagaagtttacacaacaagcactgtccagttttcacactactgaaaagagtggtgctgtcaaacaaaaacttggtttcaacgagtttaataacttgactaatttgagtaagaataagaccgaaattatcactctggtatccgatgatatctctaaacttcaatctgttaagattaatttcgaatttgtgtgtttgggagaattaaatccagacatcactcttcgaaaagaaacaggtagatatgtagtagatataatagtcaatagattatacatcaagagagcagaaattaccgaattagtcgtcgaatatatgattgaacgatttgtttcctttagcgtcattgtaaaggaatggggtatggagacattcattgaggacgatgataatatcagattcactgtctacctaaattttgttgaaccggaggaattgaatcttagtaagtttatgatggttcttccgggtgccgccaacaagggcaagattagtaaattcaagattcctatctctgactatacgggatatgacgacttcaatcaaacaaaaaagctcaataagatgactgtagaactcatgaatctaaaagaattgggttctttcgatttggagaacgtcaacgtgtatcctggagtatggaatacatacgatatcttcggtatcgaggccgctcgtggatacttgtgcgaagccatgttaaacacctatggagaaggtttcgattatctgtatcagccttgtgatcttcttgctagtttactatgtgctagttacgaaccagaatcagtgaataaattcaagttcggtgcagctagtactcttaagagagctacgttcggagacaataaagcattgttaaacgcggctcttcataaaaagtcagaacctattaacgataatagtagctgccacttttttagcaaggtccctaatataggaactggatattacaaatactttatcgacttgggtcttctcatgagaatggaaaggaaactatctgataagatatcttctcaaaagatcaaggagatggaagaaacagaagacttttaattcttatcaataacatatttttctattatctgtcttttaaacgatggattttccacaaatgcgcctctcaagtccctcatagaatgatacacgtataaaaaatatagcataggcgatgactccttatttttagacattagatatgccaaaatcatagcaccacttctatttactcccgcagcacaatgaaccaacacgggctcgtttcgttgatcacatttagataagaaggcggtcacgtcgtcaaaatatttactaatgtcggtagttgtatcatctaccaacggtatatgaataatattaatattagagttaggaaatgtatatttatccatcgtcaaattcaaaacatatttgaacttaacttcagatgatggcgcatccatagcatttttataatttcccaaatatacattattggttacccttgtcattatagtgggagatttggctctgtgcatatctccagttgaacgtagtagtaagtatttatacaaacttttcttatccatttataacgtacaaatggataaaactactttatcggtaaacgcgtgtaatttagaatacgttagagaaaaggctatagttggcgtacaagcagccaagacatcaacacttatattctttgttattatcttggcgattagtgcgctattactctggtttcagacgtctgataatccagtctttaatgaattaacgagatatatgcgaattaaaaatacggttaacgattggaaatcattaacggatagcaaaacaaaattagaaagtgatagaggtagacttctagccgctggtaaggatgacatattcgacttcaaatgtgtggatttcggcgcctattttatagctatgcgattggataaaaaaacatatctgccgcaagctattaggcgaggcactggagacgcgtggatgattaaaaaggcggcaaaggtcgatccatctgctcaacaattttgtcagtatttgataaaacacaagtctaataatgttattacttgtggtaatgagatgttaaatgaattaggttatagcggttattttatgtcaccgcattggtgttccgatcttagtaatatggaatagtttagataaatgcggtaacaaatgttcctgtaaggaaccataacagtttagatttaacgttaaagatgagcataaacataataaacaaaattacaatcaaacctataacattaatatcaaacaatccaaaaaatgaaatcagtggagtagtaaacgcgtacataactcctggataacgtttagcagctgccgttcctattctagaccaaaaattcggtttcatgtgttcgaaacggtattctgcaacaagtcgaggatcgtgttctacatatttggcggcgttatccagtatctgcctattgatcttcatttcgttttcgattctggctatttcaaaataaaatcccgatgatagacctccagactttataatttcatctacgatgttcagcgccgtagtaactctaataatataggctgataagctaacatcataccctcctgtatatatgaatatggcatgatctttgtccattactagctcagttttaactttattgcctgtaataatttctctcatctgtaggatatctattttcttgtcatgcattgccttcaagacgggacgaagaaacgtaatatcctcaataacgttatcgttttctacaacaactacatattctacctttttattttctagctcggtaaaaaatttagaatcccatagggctaaatgtctagcgatatttcttttcgtttcctctgtacacatagtgttacaaaaccctgaaaagaagtgagtatacttgtcatcatctctaatgtttcctccagtccattgtataaacgcataatccttgtaatgatctggatcatccttgactatcacaatatctcttttttctggcataacttcattgtccttcacatcatcgaacttctgatcattaatatgctcatgaacattaggaaatgtttctgatggaggtctatcaataactggcacaacaataacaggagttttattcgccgccgccatttagttattgaaattaatcatatacaactctctaatacgagttatattttcgtctatccattgtttcacattgacatattttgacaaaaagatataaaatgcgtattccaatgcttccctgtttaatgaattactaaaatatacaaacacgtcactgtctggtaataaatgatatcttagaatattgtaacaatttattttgtattgtacatgttcatgatctatgagttcttcttcgaatggcatcggatctccgaatctgaaaacgtataaataggagttagaataataatatttgagagtattggtaatatataaactctttagcggtataattagtttttttctctcgatttctatttttagatgtgatggaaaaatgactaattttgtagcattagtatcatgaactctaatcaaaatcttaatatcttcgtcacacgttagctctttgaactgtttaagagatgcatcagttggttccacggatggagtaggtgcaacaattttttgttctatacatgtatgtattggagccattgtcttaactataatggtacttgtatcgaaaaactttaatgcggataacggaagctcttcgccgcgactttctacgtcgtagttgggttctaacgccgatctctgaatggatactagttttctaagttctaatgtgattctctgaaaatgtaaatccaattcctccggcattatagttgtgtatacatcggtaaataaaactatagtatccaacgatcccttctcgcaaattctagtcttaaccaagaaatcgtatataaccacggagatggcgtatttaagagtggattcttctaccgttttgttcttggatttcatataagaaactataaagtccgcactactgttaagaatgattactaacgcaactatatagtttaaattaagcatcttggaaacataaaataactctgtagacgatacttgactttcgaataagtttgcagacaaacgaagaaagaacagacctctcttaatttcagaagaaaactttttttcgtattcctgacgtctagagtttatatcaataagaaagttaagaattagtctgttaatgttgtatttcattacccaagtttgagatttcataatattatcaaaagacatgataatattaaagataaagcgctgactatgaacgaaatagctatatggttcgctcaagaatatagtcttgttaaacgtggaaacgataactgtatttttaatcacgtcagcggcatctaaattaaatataggtatatttattccacacactctacaatatgccacaccatcttcataataaataaattcgttagcaaaattattaattttagtgaaatagttagcgtcaactttcatagcttccttcaatctaatttgatgctcacacggtgcgaattctactctaacatcccttttccatgcctcaggttcatcgatctctataatatctagtttcttgagttttacaaacacgggctcgtctctcgcgatgagatctgtatagtaactatgtaaatgataactagatagaaagatgtagctatatagatgacgatcctttaagagaggtataataactttaccccaatcagatagactgttgttatggtcttcggaaaaagaatttttataaatttttccagtattttccaaatatacgtacttgacatctaaaaaatccttaatgataataggaatggataatccgtctattttataaagaaatacatatcgcacattatacttttttttggaaatgggaataccgatgtgtctacataaatacgcaaagtctaaatattttttagagaatcttagttggtccaaattcttttccaagtacggtaatagatttttcatattgaacggtatcttcttgatctctggttctaattccgcattaaatgatgaaactaagtcactatttttataactaacgattacatcacctctaacatcatcatttaccaggatactgatcttcttttgtcgtagatacatgtctaatgtgttaaaaaaaagatcatacaagttatacgtcatttcatctgtagtattcttgtcattgaaggataaactcgtactaatctcttctttaacagtctgttcaaatttatatcctatatacgaaaaaatagcaaccagtgtttgatcatccgcgtcaatattctgttctatcgtagtgtataacaatcttatatcttcttccgtgatagttgatacgttataaaggttgataacgaaaatatttttatttcgtgaaataaagtcatcgtaggattttggacttatattcgcgtctagtagatatgcttttatttttggaatgatctcaattagaatagtctctttagagtccatttaaagttacaaacaactaggaaattggtttatgatgtataatttttttagtttttatagattctttattctatacttaaaaaatgaaaataaatacaaaggttcttgagggttgtgttaaattgaaagcgagaaataatcataaattatttcattatcgcgatatccgttaagtttgtatcgtaatggcgtggtcaattacgaataaagcggatactagtagtttcacaaagatggctgaaatcagagcccatctaagaaatagcgctgaaaataaagataaaaacgaggatattttcccggaagatgtaataattccgtctactaagcccaaaaccaaacgagccgctgctcctcgtaaaccagcggctactaaaagatcaaccaaaaaggaagaagtggaagaagaagtagttgtagaagaatatcatcaaacaactgaagaaaattcgccacctccgtcatcatctcctggagttggtgacattgtagaaagcgtggccgctgtagagctcgacgatagcgacggggatgatgaacctatggcacaagctggagctaaagtaaatcatagtgctagaagcgatgtctctgacctaaaggtggccactgacaatatcgttaaagatcttaagaaaattattactagaatcgctgcagtatcgactgttctagaggatgttcaagcagctggtatctctagacaatttacttctatgactaaagctattacaacactatctgatctagtcaccgagggaaaatctaaagttgttcgtaaaaaagttaaaacttgtaagaagtaaatgcgcgcacttttttataaagatggtaaactgtttaccgataataattttttaaatcctgtatcagacgataatccagcgtatgaggttttgcaacatgttaaaattcctactcatttaacagatgtagtagtatatgaacaaacgtgggaagaggcgttaactagattaatttttgtgggaagcgattcaaaaggacgtagacaatacttttacggaaaaatgcatgtacagaatcgcaactctaaaagagatcgtatttttgttagagtatataatgttatgaaacgaattaattgttttataaacaaaaatataaagaaatcggccacagattccaattatcagttggcggtttttatgttaatggaaactatgttttttattagatttggtaaaatgaaatatcttaaggagaatgaaacagtagggttattaacactaaaaaataaacatatagaaataagtcctgatgaaatagttatcaagtttgtaggaaaggacaaagtttcacacgaatttgttgttcataagtctaatagactatataaaccgctattgaaactgacggatgattctagtcccgaagaatttctgttcaacaaactaagtgaacgaaaggtatacgaatgtatcaaacagtttggtattagaatcaaggatctccgaacgtatggagtcaattatacgtttttatataatttttggacaaatgtaaagtccatatctcctcttccgtcaccaaaaaagttaatagcgttaactatcaaacaaactgctgaagtggtaggtcatactccatcaatttcaaaaagagcttatatggcaacgactattttagaaatggtaaaggataaaaattttttagatgtagtatctaaaactacgttcgatgaattcctatctatagtcgtagatcacgttaaatcatctacggatggatgatatagatctttacacaaataattacaagaccgataaatggacatggataagcgtatgaaatctctcgcaatgaccgctttcttcggagagctaaacacattagatattatggcattgataatgtctatatttaaacgccatccaaacaataccattttttcagtggataaggatggtcagtttattattgatttcgaatacgataattataaggcttctcaatatttggatctgacccttactcagatatctggagatgaatgcaagactcacgcatcgagtatagccgaacaattggcgtgtgtggatattattaaagaggatattagcgaatatatcaaaactactccccgtcttaaacgatttataaaaaaataccgcaatagatcagatactcgtatcagtcgagatacagaaaagcttaaaatagctctagctaaaggcatagattacgaatatataaaagacgcttgttaataagtaaatgaaaaaaaactagtcgtttataataaaacacgatatggatgccaacgtagtatcatcttctactatcgcgacatatatagacgctttagcaaagaatgcatcggaattagaacagggttctaccgcatacgaaataaataatgaattggaactagtatttattaagccgccattgattactttgacaaatgtggtaaatatctccacgattcaagaatcgtttattcgatttaccgttactaataaggaaggtgtaaaaattagaactaagattccattatctaaggtacatggtctagatgtaaaaaatgtacagttagtagatgctatagataacatagtttgggaaaagaaatcattagtgacggaaaatcgtcttcacaaagaatgcttgttgagactatcgacagaggaacgtcatatatttttggattacaagaaatatggatcctctatccgactagaattagtcaatcttattcaagcaaaaacaaaaaactttacgatagactttaagctaaaatattttctaggatccggtgcccaatctaaaagttctttgttgcacgctattaatcatccaaagtcaaggcctaatacatctctggaaatagaattcacacctagagacaatgaaaaagttccatatgatgaactaataaaggaattgacgactctctcgcgtcatatatttatggcttctccagagaatgtaattctttctccacctattaacccacctataaagacttttatgttgcctaaacaagatatagtaggtcttgatctggaaaatctatatgctgtaactaagactgacggcattcctataactatcagagttacatcaaaagggttgtattgttattttacacatcttgggtatattattagatatccagttaagagaataatagattccgaagtagtagtctttggtgaggcagttaaggataagaactggaccgtatatctcattaagctaatagagcccgtgaatgctatcagtgatagactagaagaaagtaagtatgttgaatctaaactagtggatatttgtgatcggatagtattcaagtcaaagaaatacgaaggtccgtttactacaactagtgaagtcgtcgatatgttatctacatatttaccaaagcaaccagaaggtgttattctgttctattcaaagggacctaaatctaacattgattttaaaatcaaaaaggagaatactatagaccaaactgcaaatgtagtatttaggtacatgtccagtgaaccaattatctttggagagtcgtctatctttatagagtataagaaatttaccaacgataaaggctttcctaaagaatatggttctggtaagattgtgttatacaacggcgttaattatctaaataatatctattgtttggaatatattaatacacataatgaagtgggtattaagtccgtggttgtacctattaagtttatagcagaattcttagtcaatggagaaatacttaaacctagaatcgataaaaccatgaaatatattaactcagaagactattatggaaatcaacataatgtcatagtcgaacatttaagagatcaaagcatcaaaataggagatgtctttaacgaggacaaactatctgatgtaggacatcaatatgccaataatgataaatttagattaaatccagaagttagttattttacgaataaacgaactagaggaccgttgggaattttatcgaactatgtcaagactcttcttatttctatgtattgttccaaaacatttttagacgattccaacaaacgaaaggtattggcgattgattttggaaacggtgcggacctggaaaaatacttttatggagagattgcgttattggtagccacggatccggatgccgatgctatagctagaggaaatgaaagatacaacaaattaaattctggaattaaaaccaagtactacaaatttgactacattcaggaaactattcgatccgatacatttgtctctagtgtcagagaagtattctattttggaaagtttaatatcattgactggcagttcgctattcattattcgtttcatccaagacattatgctacagtcatgaataacttatccgaactaactgcttctggaggcaaggtattaattactaccatggatggagacaaattatcaaaattaaccgataaaaagacttttataattcataagaatctacctagtagtgaaaactatatgtctgtagaaaaaatagctgatgatagaatattggtatataatccatcaacaatgtctactccaatgactgaatacattatcaaaaagaatgatatagtcagagtgtttaacgaatacggatttgttcttgtagataacattgatttcgctacaattattgaacgaagtaaaaagtttattaatggcgcatctacaatggaagatagaccgtctacaagaaactttttcgaactaaatagaggagccattaaatgtgaagggttagatgtcgaagacttacttagttactatgttgtttatgtcttttctaagcggtaaataataatatggtatgggttctgatctccccgttctaaatgcattaaataattccaatagagcgatttttgttcctataggaccttccaactgtggatactctgtattgttaatagatatattaatacttttgtcaggtaacagaggttctacgtcttctaaaaataaaagttttataacatctggcctgttcataaataaaaacttggcgattctatatatactcttattatcaaatctagccattgtcttatagatgtgagctactgtaggtgtaccatttgattttctttctaatactatatatttctctcgaagaagttcttgcacatcatctgggaataaaatactactgttgagtaaatcagttattttttttatatcgatattgatggacatttttatagttaaggataataagtatcccaaagtcgataacgacgaccacgaagtatttatacttttaggaaatcacaatgactttatcagatcaaaattaacaaaattaaaggagcatgtatttttttctgaatatattgtgactccagataaatatggatctttatgcgtcgaattaaatggatctagttttcagcacggtggtagatatatagaggtggaggaatttatagatgctggaagacaagttagatggtgttctacatccaatcatatatctgaagatataacagaagatatacacactgataaatttgtcatttatgatatttatacgtttgattcgttcaagaataaacgattggtatttgtacaggtgcctccatcattaggagatgatagctatttgactaatccgttattgtctccgtattatcgtaattcagtagccagacaaatggtcaatgatatgatttttaatcaagattcatttttaaaatatttattagaacatctgattagaagccactatagagtttctaaacatataacaatagttagatacaaggataccgaagaattaaatctaacgagaatatgttataatagagataagtttaaggcgtttgtattcgcttggtttaacggtgtttcggaaaatgaaaaggtactagatacgtataaaaaggtatctgatttgatataatgaattcagtgactgtatcacacgcaccatatactattacttatcacaatgattgggaaccagtaatgagtcaattggtagagttttataacgaggtcgctaactggctgttaagagatgagacctcgcctattcctgataacttctttatacagttgaaacaacctcttagaaataaacgagtatgtgtatgtggtatagatccgtatcctagagatggaacaggtgtaccgtttgagtcaccaaattttacaaaaaaatcaattaaggagatagcttcatctatatctagattaaccggagtaattgattataaaggttataaccttaatataatagacggggttataccctggaattattacttaagttgtaaattaggagaaacaaaaagtcacgcgatttactgggataagatttctaagttacttctgcagcatataactaaacacgttagtgttctttattgtttgggtaaaacagatttctctaatatacgggcaaagttagaatccccggtaactaccatagtgggatatcatccagcggccagagaccgccaattcgagaaagatcgatcatttgaaattatcaacgttttactggaattagacaacaaggcacctataaattgggctcaagggtttatttattaatgctttagtgaaattttaacttgtgttctaaatggatgcgactattagaggtaatgatgttatctttgttcttaagactataggtgtcccgtcagcatgtagacaaaatgaagatccaagattcgtagaagcatttaaatgcgacgagttagaaagatatattgataataatccagaatgtacactattcgaaagtcttagggatgaggaagcatactctatagtcagaattttcatggatgtagatttagacgcgtgtctagacgaaatagattatttaacggctattcaagattttattatcgaggtgtcaaactgtgtagctagattcgcgtttatagaatgcggtgccattcatgaaaatgtaataaaatccatgagatctaatttttcattgactaagtctacaaatagagataaaacaagttttcatattatctttttagacacgtataccactatggatacattgatagctatgaaacgaacactattagaattaagtagatcatctgaaaatccactaactagatcgatagacactgctgtatataggagaaaaacaactcttcgggttgtaggtactaggaaaaatccaaattgcgacactattcatgtaatgcaaccacctcatgataatatagaagattacctattcacttacgtgaatatgaataacgatagttattacttttctctacaacgacgattggaggatttagttcctgataagttatgggaaccagggtttatttcattcgaagacgctataaaaagagtttcaaaaatattagttaattctataataaactttaatgatattgatgaaaataattttacaacggtaccactagtcatagattacgtaacaccttgtgcattatgtaaaaaacgatcgcataaacatccacatcaactatcgttggaaaatggtgctattagaatttacaaaactggtaatccacatagttgtaaagttaaaattgttccgttggatggcaacaaactgtttaatattgcacaaagaattttagacactaactctgttttattaaccgaacgaggagatcatatagtttggattaataattcatggaaatttaacagcgaagaacccttgataacaaaactaattctgtcaataagacatcaactacctaaggaatattcaagcgaattactctgtccgaggaaacgaaagactgtagaagctaacatacgagacatgttagtagattcagtagagaccgatacctatccggataaacttccgtttaaaaatggtgtattggacctggtagacggaatgttttactctggagatgatgctaaaaaatatacgtgtactgtatcaaccggatttaaatttgacgatacaaagttcgtagaagacagtccagaaatggaagagttaatgaatatcattaacgatatccaaccattaacggatgaaaataagaaaaatagagaattgtacgaaaaaactttatctagttgtttatgcggtgctaccaaaggatgtttaacattcttttttggagaaactgcaactggaaagtcgacaaccaaacgtttgttaaagtctgctataggtgacctgtttgttgagacgggtcaaacaattttaacagatgtattggataaaggacctaatccatttatcgctaatatgcatttaaaaagatctgtattctgtagcgaactacctgattttgcatgtagtggatcaaagaaaattagatctgataatattaaaaagttgacagaaccttgtgtcattggaagaccgtgtttctccaataaaattaataatagaaaccatgcgacaatcattatcgatactaattacaaacctgtctttgataggatagataacgcattaatgagaagaattgccgtcgtgcgattcagaacacacttttctcaaccttctggtagagaggctgctgaaaataatgacgcgtacgataaagtcaaactattagacgagggattagatggtaaaatacagaataatagatatagattcgcatttctatacttgttggttaaatggtacaaaaaatatcatattcctattatgaaactatatcctacaccggaagagattccggactttgcattctatctcaaaataggtactctgttggtctctagctctgtaaagcatattccattaatgacggacctctccaaaaagggatatatattgtacgataatgtggtcactcttccgttgaatactttccaacagaaaatatccaagtattttaattctagactatttggacacgatatagagagcttcatcaatagacataagaaatttgccaatgttagtgatgaatatctgcaatatatattcatagaggatatttcatctccgtaaatatatgctcatatatttatagaagatatcacatatctaaatgaataccggaatcatagatttatttgataatcatgttgatagtataccaactatattacctcatcagttagctactctagattatctagttagaactatcatagatgagaacagaagcgtgttattgttccatattatgggatcaggtaaaacaataatcgctttgttgttcgccttggtagcttccagatttaaaaaggtttacattttagtgcctaacatcaacattttgaaaatttttaattataatatgggtgtagctatgaacttgtttaatgacgaattcatagctgagaatatctttattcattcaacaacaagtttttattctcttaattataacgataacgtcattaattataacggattatctcgctataataactctatttttatcgttgatgaggcacacaatatctttgggaataatactggagaacttatgaccgtgataaaaaataaaaacaagattccttttctactattgtctggatctcccattactaacacacctaatacgctaggtcatattatagatttaatgtccgaagagacgatagattttggtgagattattagtcgtggtaagaaagtaattcagacacttcttaacgaacgcggtgtgaatgtactcaaggatttgcttaaaggaagaatatcatattacgaaatgccggataaagatctgccaacgataagatatcatggacgtaagtttctagatactagggtagtatattgtcacatgtctaaacttcaagagagagattatatgattactagacgacagctatgttatcatgaaatgtttgataaaaatatgtataacgtgtcaatggcagtattgggacaacttaatctgatgaataatttagatacgttatttcaggaacaggataaggaattgtacccaaatctgaaaataaataatggcgtgttatacggtgaagaattggtaacgttaaacattagttccaaatttaagtactttatcaatcggatacagacactcaagggaaaacattttatatacttctctaattctacatatggcggattggtaattaaatatatcatgctcagtaatggatattctgaatataatggttcacagggaactaatccacatatgataaacggcaaaccaaaaacatttgctatcgttactagtaaaatgaaatcgtctttagaggatctattagatgtgtataattctcctgaaaacgatgatggtagtcaattgatgtttttgttttcgtcaaacattatgtccgaatcctatactctgaaagaggtaaggcatatttggtttatgactatcccggatactttttctcaatacaaccaaattcttggacgatctattagaaaattctcttacgccgatatttctgaacccgttaatgtatatcttttagccgccgtatattccgatttcaatgacgaagtgacatcattaaacgattatacgcaggatgaattgattaatgttttaccctttgacatcaaaaagctgttatatctaaaattcaagaccaaagaaacgaatagaatatactctattcttcaagagatgtctgaaacgtattctcttccaccacatccatcaattgtaaaagttttattgggagaattagtcagacaatttttttataataattctcgtattaagtataacgactccaagttacttaaaatggttacatcagttataaaaaataaagaagacgctaggaattacatagatgatattgtaaacggtcacttctttgtaacgaataaagtatttgataaatctcttttatacaaatacgaaaacgatattattacagtaccgtttagactttcctacgaaccgtttgtttggggagttaactttcgtaaggaatataacgtggtatcttctccataaaactgatgagatatataaagaaataaatgtcgagctttgttaccaatggatacctttccgttacattggaacctcatgagctgacgttagacataaaaactaatattaggaatgccgtatataagacgtatctccatagagaaattagtggtaaaatggccaagaaaatagaaattcgtgaagacgtggaattacctctcggcgaaatagttaataattctgtagttataaacgttccgtgtgtaataacctacgcgtattatcacgttggggatatagtcagaggaacattaaacatcgaagatgaatcaaatgtaactattcaatgtggagatttaatctgtaaactaagtagagattcgggtactgtatcatttagcgattcaaagtactgcttttttcgaaatggtaatgcgtatgataacggcagcgaagtcactgccgttctaatggaggctcaacaaggtatcgaatctagttttgtttttctcgcgaatatcgtcgactcataagaaagagaatagcggtaagtataaacacgaatactatggcaataattgcaaatgttttattcccttcgatatatttttgataatatgaaaaacatgcctctctcaaatcggacaaccatttcataaaatagttctctcgcgctggcgaggtggttgccgctcgtataatctccccagaataatatacttgcgtgtcgtcgttcaatttatacggatttctatagttctctgttatataatgaggtttaccctcatgattagacgacgacaatagtgttctgaatttagatagttgatcagaatgaatgtttattggagttggaaaaattatccatgctgcgtttgcagagtggttgatagttgttcctagatatgtaaaataatccaacgtactaggcagtaaattgtctagataaaatactgaatcaaacggcacagacgtattagcggatctaatggaatccaattgattgactatcttttgaaaatatacatttttatgatccgatacttgtaagaatatagcaacaatgataattccatcatcgtgtttttttgcctcttcataagaactatattttttcttattccaatgaaccagattaatctctccagagtatttgtatacatctatcaagtgattggatccatagtcgtcttcctttccccaatatatatgtattgttgataacacatattcattggggagaaaccctccacttatatatcctcctttaaaattaatccttactagttttccagtattctggatagtggttggtttcgactcattataatgtatatctaacggcttcaatcgcgcgtcagaaattgcttttttagtttctatattaataggagatagttgttgagtcatagtaaaaatgaaatgataactgtttagaaatagctcttagtatgggaattacaatggacgaggaagtgatatttgaaactcctagagaattaatatctattaaacgaataaaagatattccaagatcaaaagacacgcacgtgtttgctgcgtgtataacaagtgatggatatccgttaataggagctagaagaacttcattcgcattccaggcgatattatctcaacaaaattcagattctatctttagagtatccactaaactattacggtttatgtactacaatgaactaagagaaatctttagacggttgagaaaaggttctatcaacaatatcgatcctcacttcgaagagttaatattattgggtggtaaactagataaaaaggaatctattaaagattgtttaagaagagaattaaaagaggaaagtgatgaacgtataacggtaaaagaattcggaaatgtaattctaaaacttacaacgcgcgataaattatttaataaagtatatataggttattgcatggcatgttttattaatcaatcgttggaggatttatcacatactagtatttacaatgtagaaattagaaagattaaatccttaaatgattgtattaacgatgataaatacgaatatctgtcttatatttataatatgctagttaatagtaaatgaacttttacagatctagtataattagtcagattattaagtataatagacgactagccaagtctattatttgcgaggatgactctcaaattattacactcacggcattcgttaaccaatgcctatggtgtcataaacgagtatccgtgtccgctattttattaactactgataacaaaatattagtgtgtaacagacgagatagttttctctattctgaaataattagaactagaaacatgtctagaaagaaacgattatttctgaattattccaattatttgaacaaacaggaaagaagtatactatcgtcatttttttctctatatccagctactactgataatgatagaatagacgctatttatccgggcggtatacccaaaaggggtgagaacgttccagagtgtctatccagggaaatcaaagaagaagttaatatagataattcttttgtattcatagacactcgtttttttattcatggtatcatagaagatactattattaacaaattttttgaggtaattttctttgtcggaagaatatctctaacgagtgatcaaattattgatacctttaaaagtaatcatgaaataaaggatctaatatttttagatccgaattcaggtaatggactccaatacgaaattgcaaaatatgctctagatactgcaaaacttaaatgttacggccatagaggatgttattatgaatcattaaaaaaattaactgaggatgattgattagaaaatataaattaatttaccatcgtgtatttttataacgggattgtctggcatatcatgtagatagttaccgtctacatcgtatactctaccatctacgcctttaaatcctctatttattgacattaatctattagaattggaataccaaatattagtaccctcaattagtttattggtaatattttttttagacgatagatcgatggctcttgaaaccaaggttttccaaccggactcattgtcgatcggtgagaagtctttttcattagcatgaatccattctaatgatgtatgtttaaacactctaaacaattggacaaattcttttgatttgctttgaatgatttcaaataggtcttcgtctacagtaggcataccattagataatctagccattataaagtgcacgtttacatatctacgttctggaggagtaagaacgtgactattgagacgaatggctcttcctactatctgacgaagagacgcctcgttccatgtcatatctaaaatgaagatatcattgattgagaagaaactaataccctcgcctccactagaagagaatacgcatgttttaatgcattctccgttagtgtttgattcttggttaaactcagccaccgccttgattctagtatctttagttctagatgagaactctatattagagataccaaagactttgaaatatagtaataagatttctattcctgactgattaacaaatggttcaaagactagacatttaccatgggatgctaatattcccaaacatacatctataaatttgacgcttttctcctttaattcagtaaatagagagatatcagccgcactagcatcccctcccaatagttctccccttttaaaggtatctaatgcggatttagaaaattctctatctcttaatgaatttttaaaatcattatatagtgttgctatctcttgcgcgtattcgccgggatcacgattttgtctttcaggaaagctatcgaacgtaaacgtagtagccatgcgtctcagaattctaaatgatgatataccagtttttatttctgcgagtttagccttttgataaatctcttcttgcttttttgacatattaacgtatcgcattaatactgttttcttagcgaatgatgcagacccttctacgtcatcaaaaatagaaaactcgttattaactatgtacgaacataggcctcctagtttggagactaattctttctcatcaactagacgtttattctcaaatagcgattggtgttgtaaggatcctggtcgcagtaagttaaccaacatagtgaattcttgcacactattgacgataggtgtagccgataaacaaatcatcttatggttttttaacgcgatggtcttagataaaaaattatatactgaacgagtaggacggatcttgccatcttctttgattaatgatttagaaatgaagttatgacattcatcaatgatgacgcatattctactcttggaattaatagttttgatattagtaaaaaatttatttctaaaattttgatcatcgtaattaataaaaatacaatccttcgttatctctggagcgtatctgagtatagtgttcatccaaggatcttctatcaaagcctttttcaccaataagataattgcccaattcgtataaatatccttaagatgtttgagaatatatacagtagtcattgttttaccgacacccgtttcatggaacaataaaagagaatgcatactgtctaatcctaagaaaactcttgctacaaaatgttgataatccttgaggcgtactacgtctgaccccatcatttcaacgggcatattagtagttctgcgtaaggcataatcgatataggccgcgtgtgatttactcatttatgagtgataagtaataactatgttttaaaatcacagcagtagtttaactagtcttctctgatgtttgttttcgatactttttgaatcagaagtcatactagaataaagtaacgagtgaacgtaatagagagcttcgtatactctattcgaaaactctaagaacttattaatgaattccgtatccactggatcgtttaaaatactaaattgaacactgttcacatccttccaagaagacgacttagtgacggacttaacatgagacataaataaatccaaattttttttacaaacatcactagccaccataatggcgctatctttcaaccagctatcgcttacgcatttcagcagtctaacatttttaaagagactacaatatattctcatggtatcgattacacctctaccgaatagagtaggaagtttaataatacaatatttttcgtttacaaaatcaaataatggtcgaaacacgtcgaaggttaacatcttataatcgctaatgtatagattgttttcagtgagatgattattagatttaatagcatctcgttcacgtttgaacagtttattgcgtgcactgagatcggcaactacagcatctgctttagtactcctaccataatactttacgctattaatctttaaaatttcatagactttatctagatcgctttctggtaacatgatatcgtgtgtaaaaagttttaacatgtctgttggcattctatttagatcattaactctagaaatctgaagaaagtaattagctccgtattccagactaggtaatgggcttttacctaaagacaagttaagttctggcaatgtttcataaaatggaagaaggacatgcgtcccctcccggatattttttacaatttcatccatttacaactctatagtttgttttcattattattagttattatctcccataatcttggtaatacttaccccttgatcgtaagataccttatacaggtcattacatacaactaccaattgtttttgtacataatagattggatggttgacatccatggtggaataaactactcgaacagatagtttatctttccccctagatacattggccgtaatagttgtcggcctaaagaatatctttggtgtaaagttaaaagttagggttcttgttccattattgctttttgtcagtagttcgttataaattctcgagatgggcccgttctctgaatatagaacatcatttccaaatctaacttctagtctagaaataatatcggtcttattcttaaaatcgattcccttgatgaagggatcgttaatgaacaaatccttggcctttgattcggctgatctattatctccgttatagacattacgttgactagtccaaagacttacaggaatagatgtatcgatgatgttgatagtatgtgatatgtgagcaaagactgttctcttggtggcgtcgctatatgttccagtaatggcggaaaactttttagaaatgttatatataaaagaattttttcgggttccaaacattagcagattagtatgaagataaacactcatattatcaggaacattatcaatttttacatacacatcagcatcttgaatagaaacaataccatcttctggaacctcgacgatctcggcagactccggataaccagtcggtggaccatcgctaacaataactagatcatccaacaatctactcacatatgcatctatataatctttttcgtcttgtgcatatcccggatacgaaataaacttattatccgtatttccataataaggtttagtataaacagagagagatgttgccgcatgaacttcggttactgtcgccgttggttggtttatttgacctattactctcctaggtttctctataaatgatggtttaatttgaacattcttaaccatatatccaataaagctcaattcaggaacataaacaaattctttgttgaacgtttcaaagtcgaacgaagagtcacgaataacgatatcggatactggattgaaggtcaccgttacggtaatttttgaatcggatagtttaagactactgaatgtatcttccacatcaaacggagttttaatataaacgtatactgtagatggttctttaatagtgtcgttaggagttaggccaatagaaatatcattaagttcactagaatatccagaatgcttcaaagcaattgtgttattgatacaattattatataattcttcgccctcaatttcccaaataacaccgttacacgaagagatagatacgtgattaatgcatttatatccaacatatggtacgtacccgaatcttcctattcctttaacttctggaagttccaaactcataaccaaatgattaagcgcagtaatatactgatccctaatttcgaagctagcaatagcctgattgtcgggaccatcgtttgtcataactccggatagagaaatatattgcggcatatacaaagttggaatttgactatcgaccgcgaagacattagaccgtttaatagagtcatccccaccgatcaaagaattaatgatggtattattcattttctatttaaaatggaaaaagcttacaataaactccgtagagaaatatctataatttgtgagttttccttaaagtaacagcttccgtaaacaccgtctttatctcttagtaagtttattgtatttatgaccttttccttatcttcatagaatactaaaggtaacaacgaaatttttggctcttctctaagagctacgtgagacttaaccatagacgccaacgaatccctacatattttagaacagaaataccctacttcaccacccttgaatgtctcaatactaataggtttaaaaactaattcttgattacaaaaccaacacttatcaattacactatttgtcttaatagacacatctgccatagatttataatactttggtagtatacaagctagtgcttcttctttagcgggcttaaatactgctttaggtgctgaaataaccacatctggaaggcttactcgcttagccatttaattactgaactatttttttatacttctaatgagcacgtggaaaaacgctcgtccacaaaaacataatcgtgaccataatcctctaccatagtaacacgttttttagatctcatatgtgctaaaaagttttcccatactaattggttactattatttttcgtataatttttaacagtttgaggttttagatttttagttacagaagtgatatcgaatattttatccaaaaagaatgagtaattaattgtcttagaaggagtgttttcttggcaaaagaataccaagtgcttaaatatttctactacttcattaatcttttcagtactcagattcagtttctcatcttttacttgattgattatttcaaagactaacttataatcctttttatttattctctcgttagccttaagaaaactagatacaaagtttgcatctacatcatccgtagatatttgatttttttccatgatatccaagagttccgaaataatttctccagaacattgatgagacaataatctccgcaatacatttctcaaatgaataagtttattagacacatggaagtttgactttttttgtacctttgtacatttttgaaatacagactcgcaaaaaatacaatattcatatccttgttcagatactataccgttgtgtctacaaccgctacataatcgtagattcatgttaacactctacgtatctcgtcgtccaatattttatataaaaacattttatttctagacgttgccagaaaatcctgtaatacttttagtttttggggttgtgaataaagtatcgccctaatattgttaccgtcctccgccaacatagtagttagattatcagcgcatgcagaagaacaccgcttaggcggattcagtacaatgttatatttttcgtaccaactcatttaaatatcataatctaaaatagttctgtaatatgtctagcgctaatatattgatcataatcctgtgcataaattaagatacaacaatgtcttgaaatcatcgacatggcttcttccatagttagaagatcatcgtcaaagttagcaacgtgattcatcaacatttgctgttttgaggcagcaaatactgaaccatcgccattcaaccattcataaaaaccatcgtctgaatccattgataatttcttgtactggtttttgagagctcgcatcaatctagcatttctagctcccggattgaaaacagaaagaggatcgtacatccagggtccattttctgtaaatagaatcgtataatgtcccttcaagaagatatcagacgatccacaatcaaagaattggtctccgagtttgtaacagactgcggactttaacctatacatgataccgtttagcatgatttctggtgatacgtcaatcggagtatcatctattagagatctaaagccggtgtaacattctccaccaaacatattcttattctgacgtcgttctacataaaacatcattgctccattaacgataacaggggaatgaacagcactacccatcacattagttcccaatggatcaatgtgtgtaactccagaacatcttccatagcctatgttaggaggagcgaacaccactcttccactattgccatcgaatgccatagaataaatatccttggaattgatagaaatcggactgtcggatgttgtgatcatcttcataggattaacaacgatgtatggtgccgcctgaagtttcatatcgtaaccgatgccgttcataggtctagccacagaaaccaacgtaggtctaaatccaactatagacaaaatagaagccaatatctgttcctcatctgtcataacttgagagcatccagtatgaataatcttcattagatggggatctaccgcatcatcatcgttacaataaaaaattcccattctaatgttcataattgcttttctaatcatggtatgcatgtttgctctctgaatctctgtggaaattagatctgatacacctgtaatcactatcggattatcctccgtaagacgattaaccaacaacatataattataagactttactcttctaaattcataaagttgctggattagactataagtgtctccatgtacatacgcgttctctagcgcaggaagtttaataccgaatagtgccatcagaataggatgaatgtagtaattagtttctggttttctatagataaaagacaaatcttgtgaactagacatatcggtaaaatgcatggattggaatcgtgtagttgagagaagaatatgatgattagacggagagtatattttatctaactctttgagttggtcaccgattctaggactagctcgagaatgaataagtactaaaggatgagtacatttcacagaaacactggcgttgttcaacgtactctttacatgggaaaggagttgaaatagctcgtttctatttgttctgacaatatttagtttattcataatgttaagcatatcctgaatagtaaagttagatgtgtcatacttgttagtagttagaaatttagcaattgcattcccatcatttctcaatctcgtactccaatcatgtgtagatgcgacttcgtcgatggaaataacacaatcctttttgataggctgttgagcttgatcatttcctgcacgtttaggtttggtacgttgatttctagcccctgcggatataaagtcatcgtctacaatttgggataatgaattgcatacactacaagacaaagatttatcagaagtgtgaatatgatcttcatctaccaaagaaagagtttgattagtataactagattttagtcctgcgttagatgttaaaaaaacatcgctattgaccacggcttccattatttatattcgtagtttttactcgaaagcgtgattttaatatccaatcttattacttttggaatcgttcaaaacctttgactagttgtaaaatttgatctattgccctacgtgtatattcccttgcatcatttacattcgtcaccagatcgtttgtttctgcctgaagttggtgcatatctttttcaacactcgacatgagatccttaagggacatatcgtctagattttgttgagatgctgctcctggatttggattttgttgtgctgttgtacatactgtaccaccagtaggtgtaggagtacatacagtggccacaataggaggttgaggaggtgtaactgttggagtagtacaagaaatacttccatccgattgttgtgtacacgtagtcgtcggcaacgtctgagaaggttgagtagacggtggtgttgtcgtcttttgatctttattaaatttagagaccatatcctgaatagaattgctcggtgtcaacggtttaaggagtgtactcggttgtgtattatcatctgccgacagccaatcaaaaagattaggcgtatccgatgatgtattagtttgttgtcgtggttttggtgtaggagcagtactactaggtgtaagaataggagccggtgtcggaatcggagccggtgtaggtgtaagaataggagccggtgtaggtgtcggaaccggctgtggagttatatgaatagttggttgtagcggttggataggctgtctgctggctgccatcatattatctctagctagttgttctcgcaactgtctttgataatacgactcttgagactttagtcctatttcaatcgcttcatcctttttcgtatccggatccttttcttcagaataatagattgacgactttggtgtagaggattctgccagcccctgtgagaacttgttaaagaagtccatttaaggctttaaaattgaattgcgattataagattaaatggcagacacggacgatattatcgactatgaatccgatgatctcaccgaatacgaggatgatgaagaagaggaagaagatggagagtcactagaaactagtgatatagatcccaaatcttcttataagattgtagaatcggcatccactcatatagaagatgcgcattccaatcttaaacatatagggaaccatatatctgctcttaaacgacgctatactagacgtataagtctatttgaaatagcgggtataatagcagaaagctataacttgcttcaacgaggaagattacctctagtttcagaattttctgacgaaacaatgaagcaaaatatgctacatgtaattatacaagagatagaggagggttcttgtcctatagtcatcgaaaagaacggagaattgttgtctgtaaacgattttgacaaagatggtctaaaattccatctagactatattatcaaaatttggaaacttcaaaaacgatattagaatttatacgaatatcgttctctaaatgtcacaatcaagtctctcatgttcagtagtttattgtcgtactttatatcgtgttcattaacgatattttgcaaaatagtaatgattctatcttccttcgatagatattcttcagagattattgtcttatattctttcttgttatcagatatgaatttgataagactttgaatattattaatacccgtctgtttaattttttctacggatattttagttttggcagattctatggtatctgttaatagacatccaacatcgacattcgacgtcaattgtctataaatcagagtataaattttagaaataacattagcaaattgttgtgcgttgatgtcattattctgaaacagtatgattttaggtagcattttcttaacaaagagaacgtatttattattactcagttgaacagatgatatatccagattactaacgcatctaattccgtataccaaactttcagaagaaatggtgtacaattgtttgtattcattcaatgtctccttttcagaaattagtttagagtcgaatactgcaataattttcaagagatagttttcatcagataagattttatttagtgtagatacgatgaaactattgttttgttggagaacttgatacgccgcgttctctgtagtcgacgctctcaaatgggaaacaatctccattatttttttggaatcggatacgatatcttctgtatcttgacgcagtctagtatacatagagttaagagaaattagagtttgtacattaagcaacatgtctctaaatgtggctacaaacttttccttttccacatcatctagtttattatataccgatttcacgacggcgccagatttaaggaaccagaatgaaaaactctgataactacaatatttcatcatagttacgattttatcatcttctatagttggagtgatggggcatacctttttctccaagactggaaccaacgtcataaaaatgtttaaatcaaaatccatatcaacatctgatgcgctaagaccagtctcgcgttcaagattatctttactaatggtgacgaactcatcgtatagaactctaagtttgtccattatttatttacagatttagttgtttaatttatttgtgctcttccagagttgggatagtatttttctaacgtcggtattatattattaggatctacgttcatatgtatcataatattaatcatccaggtttttataaatctatctttagcttctgaaataacgtatttaaacaaaggagaaaaatatttagctacggaatcagacgtaacaacattttttgtaaatgtgacgtacttagatgagagatcttcgttaaaaagttttccatctatataaaatccatcggttgttagcaccattcctgagtcagatcgaataggagtttgaatagtttgtttgggaaatagatccttcaataacttatagttgggtggaaaaaaatcgattttatcactagactctttcttttttactatcattacctcatgaactatttcttgaatgagtatatgtattttatttcctatatcagacgcgttcattggaaaatataccatgtcgttaactataagaatatttttatcctcgtttacaaactgaataatatcagatgtagttcgtaaacgaactatatcatcaccagcacaacatctaactatatgatatccactagtttcctttagccgtttattatcttgttccatattagcagacattccatcatttaagaaggtatcaaagataatagggagaaatgacattttggattctgttactactttaccaaaattaaggatatacggacttactatctttttctcaacatcgatttgatgaacacacgatgaaaatgtgcttctatgagattgatcatgtagaaaacaacaagggatacaatatttccgcatatcgtgaaatatattaagaaatcccaccttattatatttccccaaaggatccatgcacgtaaacattatgccgttatcattaataaagacttctttctcatcggatctgtaaaagttgttactgatttttttcattccaggatctagataattaataatgatgggttttctattcttattctttgtattttgacatatcctagaccagtaaacagtttccactttggtaaaatcagcagacttttgaacgctattaaacatggcattaatggcaataactaaaaacgtaaaatatttttctatgttaggaatatggtttttcactttaatagatatatgatttttggccaaaatgatagatatttttttatccgaggatagtaaaatattattagtcgccgtctctataaaaatgaagctagtctcgatatccaattttattctagaattgataggagtcgccaaatgtaccttatacgttatatctcccttgatgcgttccatttgtgtatctatatcggacacaagatctgtaaatagttttacgttattaatcatcacggtatcgccgtcgctagataatgctaatgtgccatccaagtcccaaatggagagatttaactgttcatcgtttagaataaaatgattaccggtcatattaataaagtgttcatcgtatctagataacaacgacttataattaatgtccaagtcttgaactcgctgaatgatcttttttaacccagttagttttagattggtacgaaatatattgttaaactttgattctacagtaatgtccaaatcgagttgtggaaatacttccatcaacattgtttcaaacttgataatattattatctacatcttcgtacgatccaaattccggaatagatgtatcgcacgctctggccacccagataaccaaaaagtcacacgctccaggatatacattgtataaaaagctatcgttttttagtagtgtttttttctgagtatatacgaagggattaaaaatagtattatcaacgtaactatattccaaattattcttatgagaatagataataatatcgtccttaatatctaacaaatttcctaaatatccctttaattgagtcattcgaagcgtcaatagaatatgtttcttaactatttccggctgttgtatatttaaatgacttcgtaagaaataatatatgggcgacttctcatctatgtaatcatatggagtgagatatagggctcgttctacctcctgccccttacccacttgtaataccaattgcggacttactatatatcgcatatttatatcgtggggtaaagtgaaaatctactaccgatgatgtaagtcttacaatgttcgaaccagtaccagatcttaatttggaggcctccgtagaactaggggaggtaaatatagatcaaacaacacctatgataaaggagaatagcggttttatatcccgtagtagacgtctattcgctcatagatctaaggatgatgagagaaaactagcactacgattctttttacaaagactttattttttagatcatagagagattcattatttgttcagatgcgtcgacgctgtaaaagacgtcactattaccaaaaaaaataacattatcgtggcgccttatatagcacttttaactatcgcatcaaaaggatgcaaacttacagaaacaatgattgaagcattctttccagaactatataatgaacatagtaagaaattcaaattcaactctcaagtatccatcatccaagaaaaactaggatatcagtctggaaactatcacgtttatgattttgaaccgtattactctacagtagctctggctattcgagatgaacattcatctggcatttttaatatccgtcaagagagttatctggtaagttcgttatctgaaataacatatagattttatctaattaatctaaaatctgatcttgttcaatggagtgctagtacgggcgctgtaattaatcaaatggtaaatactgtattgattacagtgtatgaaaagttacaactggtcatagaaaatgattcacaatttacatgttcattggctgtggaatcagaacttccaataaaattacttaaagatagaaatgaattatttacaaaattcatcaacgagttaaaaaagaccagttcattcaagataagcaaacgcgataaggatacgctactaaaatatttcacttaaaactggagttagaatttatagacgactcatttcgtttatcattattactatcattattactattaccattattaccattattaccattattaccattattaccatcattattagtgttggaattattagtattcttcttgtcatcttgttcagaaatatacaacaatgctatacctaatactaaatacattatcatgcttgcaatggctctaacaacgacgaaccaaaatgaatttggtcgtagcttttgttcacaaaaatacataaagaaatgtctacataaatctatggcgccattggctacttgaaatagcgctagtcctcctacagattttaatatagctatataacatgacatttattcatcatcaaaagagacagagtcaccatctgtcatatttagattttttttcatgtgttcaaagtatcctctactcatttcattataatagtttatcatacttagaattttaggacggatcaatgagtaagacttgactagatcgtcggtagtaatttgtgcatcgtctattctgcatccacttcgtcgaataatgtatagcatcgctttgagattctccatagctatcaagtctttatacaatgacatggaaatatctgtgaatactttatacttctccaacatcgatgccttaacatcatcgcctactttagcattgaaaatacgttctattgtgtagatggatgtagcaagatttttaaacaacaatgccatcttacacgatgattgcctcaagtctccaatcttttgtttagaacgattagctacagagtccaatgcttgactgactaacatattattatctttagaaattgtattcttcaatgaggcgtttatcatatctgtgatttcgttagtcatattacagtctgactgggttgtaatgttatccaacatatcacctatggatacggtacacgtaccagcatttgtaataatcctatctaagatgttgtatggcattgcgcagaaaatatcttctcctgtaatatctccactctcgataaatctactcagattattcttaaatgccttattctctggagaaaagatatcagtgtccatcatttcattaatagtatacgcagaaaagataccacgagtatcaattctatccaagatacttatcggttccgagtcacagataatggtttcctctccttcgggagatcctgcatagaaatatctaggacaatagtttctatactgtctgtaactctgataatctctaaagtcactaactgataccatgaaattgagaagatcaaacgctgaagtaatcaatttttctgcctcgtttttactacaactagttttcatcaatgtagtgacgatgtattgtttagttactcttggtctaatactgatgatagagatattattgcttcccataatggatcttctagtattcaccttaaagcccattgatgcgaatagcagatagataaagtcttggtatgactcctttctaatatagtacggactacctttgtcacccaactttatacccacataagccataacaacctctttaatagccgtttcatgaggtttatcagccatgagcctgagtagttggaagaatctcatgaatcctgtctcggaaagtcctatatgcatgatagatttatctttatccttcctgggaaactctcgtatagtcatagatgaaatactcttcaaagtttctgaaataagattagtaacagtcttacctccgactactctgggtaacaaacagactctaataggtgttttctctgcggagataatatcagaaaggatagagcaataagtagtattattgtgattataaagaccgaatacataacaggtagaatttataaacatcatgtcctgaaggtttttagacttgtattcctcgtaatccataccgtcccaaaacatggatttggcaactttgatagccgtagatctttgttccttcgccaacaggttaaagaaattaataaagaatttgttgtttctatttatgtaaacaaattgcatatttggaagtgccaccgttatgttcactgtagcattttgaggatctcgagtacgaagtacgatgttattgtttacttgtatatctggaaagaattctaccagtctaggaataagagattgatatcgcatagaaatacaaaagtccgtaatctcatcatcgaatatcattcggttaccattgtaataaatatccactctgtcataagtattgatgaagtactgttcatacatgatgagatatttatatgttggcatagtagtgagatcgacgtttggtaatggcaatgtattaagattaactccataatgtctagcagcatctgcgatgttataagtgtcgtcaaagcggggtctatcgtgtgctgttacatattgtctaacacctataagattatcaaaatcttgtctgcttaatacaccgttaacaatttttgccttgaattcttttattggtgcatcaataacaacatccttatagaggatgttaaacaaataagtattatcaaagttaagatctgggtatttcttttctgctagaacatccattgagtcggagccatctggtttaatataaccaccgataaatctagctctgtattctgtatccgtcaatctaatattaagaaggtgttgagtgaaaggtggaagatcgtaaaagctgtgagtattaatgataggattagtttccgaactaatgttaattggggtattaataatatcgatatttccagcgttaagtgtaacattaaacagttttaattcacttgacgtggtatcaattaaataattaatgcccaatttggatatagcagcctgaagctcattttgtttagttacggatcctaatgaattattaagcaatatatcaaacggatgaacaaaggttgttttgagttggtcacatactttgtaatctagacatagatgaggaagaacggtagaaactatacgaaatagatattcagagtcctctaattgatcaagagtaactattgacttaataggcatcatttatttagtattaaatgacgaccgtaccagtgacggatatacaaaacgacttaattacagagttttcagaagataattatccatctaacaaaaattatgaaataactcttcgtcaaatgtctattctaactcacgttaacaacgtggtagatagagaacataatgccgccgtagtgtcatctccagaggaaatatcctcacaacttaatgaagatctatttccagatgatgattctccggccactattatcgaaagagtacaacctcatactactattattgatgatactccacctcctacttttcgtagagagttattgatatcggaacaacgtcaacaacgagaaaaaagatttaatattacggtatcaaaaaatgctgaagcaataatggaatctagatctatgataacttctatgccaacacagacaccatcattgggagtagtgtatgataaagataaaagaattcagatgctagaggatgaagtggttaatcttagaaatcaacgatctaatacaaaatcatctgataatttggataattttaccagaatactatttggcaagactccgtataaatcaacagaagttaataagcgtatagctatcgttaattatgcaaatttgaacgggtccccattatcagtcgaggacttggatgtttgttcagaggatgaaatagatagaatctataaaacgattaaacaatatcacgaaagtagaaaacgaaaaattatcgtcactaacgtgattattattgtcataaacattatcgagcaggcattgctaaaactcggatttgaagaaatcaaaggactgagtaccgatatcacttcagaaattatcgatgtggagatcggagatgactgcgatgctgtagcatcaaaactaggaatcggcaacagccctgttcttaatattgtattgtttatactcaagatattcgttaaacgaattaaaattatttaatttaatacattcccatatccagacaacaatcgtctggattaatctgttcctgtcgtctcataccggacgacacagtaatctttttagtagtgggcatctttttagatggtttctttttcccagcattaactgattcgatacctagaagatcgtgattgatctctccgaccattccacgaacttctaattgtccgtctctaacggtaccataaactatttttccagcattagtaacagcttggacaatctgaccatccattgcgttgaatgatgtagttgctgttgttctacgtctaggagcaccagaagtatttttggagcccttggatgttgatgtagaagacgaggattttgattttggtttacacgtaatacattttgaactctttgattttgtatcacatgcgccggcagtcacatctgtttgagaattaagattattgttgcctcctttgacggcggcatctccaccgatttgcgctagtagatttttaagctgtggtgtaatcttattaactgtttcgatataatcatcgtaactgcttctaacggctaaattttttttatccgccatttagaagctaaaaatatttttatttatgctgaagatttaactagattatacaatgaactaatatgatccttttccagattatttacaaacttggtatttcttgtttctggaggaggcgaatttaaattcggacttggattcggattttgtgagttcttgatcttattatacatcgcgtataggatggcaacggtaactgctacacaaataccgatcaaaagaagaataccaatcatttattgacaataacttcactattgatcaagtatgcaatatatcatcttttcactaaataagtagtaataatgattcaacaatgtcgagatatatggacgataataacttagttcatggaaatatcgctatgattggtatgaatgactccgctaactctgtggggtgcgcagtgctttccccacatagaataaattagcattccgactgtgataataataccaagtataaacgccataatactcaatactttccatgtacgagtgggactggtagacttactaaagtcaataaaggcaaagatacacgaaagaatcaaaagaatgattccagcgattagcacgccggaaaaataatttccaatcataagcatcatgtccatttaactaataaaaattttaaatcgccgaatgaacaaagtggaatataaaccatataaaaacaatagtttgtactgcaaaaataatatctatttttgttttcgaagatatggtaaaattaaatagtagtacacagcatgttataactaacagcagcaacggctcgtaattacttatcatttactagacgaaaaggtggtgggatattttcttgctcaaataatacgaatatatcacccatccattttatgcgatgtttatatactctaatctttaatagatctatagacgacgggtttaccaacaatatagattttatcgattcatctaatttaaacccttccttaaacgtgaatgatctattatctggcataacgatgaccctacctgatgaatcggacaatgtactgggccatgtagaataaattatcaacgaattatcgtctacgaacatttatatcatttgttttaattttaggacgtgaataaatagatataaaatagaaaataacagatattacaaccagtgttatggccgcgcccaaccaggtaggcagttttattttatcttttactataggttctcctggatgtacgtcaccaacggcggacgtagttctagtacaattagacgtaagttctgcttgggaattttttaacgctaaagagttaacattaatcgtacacccaacgtatttacatctagttctttgaacatcttgattataatataaccattttctatctctagattcgtcggtgcactcatgtaaccaacataccctaggtcctaaatatttatctccggaattagattttggataattcgcacaccaacaatttctatttcctttatgatcgttacaaaagacgtataatgccgtatccccaaaagtaaaataatcagggcgaataattctaataaactcggaacaatatctctcatccatatgtttggaacaaatatcggaataagtagacatagccggttttcgttttgctcgtaaccattctaaacaattggggtttccaggatcgtttctgcaaaatccagtcataaaatcgtcacaatgttcggtcttgtaattattattaaatatttttggacagtgtttggtatttgtcttagaacaacattttgccacgctatcactatcgcccaggagataatccttttttataaaatgacatcgttgcccggatgctatataatcagtagcgtgttttaaatccttaatatattcaggagttacctcgttctgataatagattaatgatccaggacgaaatttgaaagaactacatggttctccacgaattaatacatattgtttagcaaattcaggaactataaaactactacaatgatctatcgacataccatctatcaaacaaaatttgggtttaatttctcctggagacgtttcataataatacatataactttcttcagcaaacttaacagctctattatattcaggataattaaaacctaattccatatatttgtctcgtatatctgctattcctggagctatcttgattctattaagagtaacggctgcccccattcttaataatcgtcagtatttaaactgttaaatgttggtatatcaacatctaccttatttcccgcattataaggtttgttacatgtatgatgttcaggaatggttatatttattcttttatagtcctgtctttcgatgttcatcacatatgcaaagaacagaataaacaaaataatgtaagaaataatattaaatatctgtgaattcgtaaatacattgattgccataataattacagcagctacaatacacacaatagacattcccacagtgttgccattacctccacgatacatttgagttactaagcaataggtaataactaagctagtaagaggcaatagaaaagatgagataaatatcatcaatatagagattagaggagggctatatagagccaagacgaacaaaatcaaaccgagtaacgttctaacatcattatttttgaagattcccaaataatcattcattcctccataatcgttttgcatcatacctccatctttaggcataaacgattgctgctgttcctctgtaaataaatctttatcaagcactccagcacccgcggagaagtcgtcaagcatattgtaatatcttaaataactcatttatatattaaaaaatgtcactattaaagatggagtataatctttatgccgaactaaaaaaaatgacttgtggtcaacccataagtctttttaatgaagacggagatttcgtagaagttgaaccgggatcatcctttaagtttctaatacctaagggattttacgcttctacttccgtaaaaacaagcctagtattcgagacattaacaacgaccgataataaaattactagtatcaatccaacaaatgcgccaaagttataccctcttcaacgcaaagtcgtatctgaagtagtttctaatatgaggaaaatgatcgaattaaaacgtcctctatacatcactcttcacttggcgtgtggatttggtaagactattaccacgtgttatcttatggctacacacggtagaaaaaccgtcatttgcgtacccaataaaatgttaatacatcaatggaagacacaggtagaggcagtcggattggaacataagatatctatagatggagttagtagtctattaaaggaactaaagactcaaagtccggatgtattaatagtagtcagtagacatctgacaaacgatgcattttgtaaatatatcaataagcattatgatttgttcatcttggatgaatcacatacgtataatctgatgaacaatacagcagttacaagatttttagcgtattatcctctgatgatgtgttattttttaactgctacacctagaccagctaacagaatttattgtaacagtattattaatattgccaagttatccgatctaaaaaaaactatctatgcagtagatagtttttttgagccatattccacagacaatattagacatatggtaaaacgactagatagtccatctaataaatatcatatatatactgagaagttattatctgtagacgagcctagaaatcaacttattcttgataccctggtagaagaattcaaatcgggaactattaatcgaattttagttattactaaactacgtgaacatatggtattattctacaaacgattattagatattttcggaccagaggttgtatttataggagacgcccaaaatagacgtactccagatatggtcaaatcaatcaaggatctaaatagatttatatttgtatccaccttattttattccggtactggtttagatattcctagtttggattctttgttcatttgctcggcagtaatcaacaatatgcaaatagagcaattactagggagggtatgtcgagaaacagaactattggataggacggtatatgtatttcccagcacatccatcaaagaaataaagtacgtgataggaaatttcgttcaacgaattattagtctatctgtagataaactaggatttaaacaagaaagttatcggaaacatcaagaatctgaacccgcttccgtaccaacatcctccagagaagaacgtgtattaaatagaatatttaactcgcaaaatcgttaagaagtttaagcgacgatccgcatgctgcgcaggccagtgtattacccctcatagtattaatataatccaatgatacttttgtgatgtcggaaatcttaaccaatttagactgacaggcagaacacgtcatgcaatcatcatcgtcatcgataactgtagtcttgggcttctttttgcggctcttcattccggaacgcacattggtgctatccatttaggtagtaaaaaataagtcagaatatgccctatagcacgatcgtgcaaaacctggtatatcgtctctatctttatcgcaatatagtgtatcgacatttttattattattgacctcgtgtatcttggaacatggaataggaacatttttgttatcaacggccacctttgccttaattccggatgttgtaaaattataactaaacagtctatcatcgacacaaatgaaattcttgtttagacgtttgtagtttacgtatgcggctcgttcgcgtctcattttttcagatattgcaggtactataatattaaaaataagaatgaaataacataggattaaaaataaagttatcatgacttctagcgctgatttaactaacttaaaagaattacttagtctgtacaaaagtttgagattttcagattctgcggctatagagaagtataattctttggtagaatggggaacatctacttactggaaaataggcgtgcaaaaggtagctaatgtcgagacgtcaatatctgattattatgatgaggtaaaaaataaaccgtttaatattgatccgggatattacattttcttaccagtatattttggaagcgtctttatttattcgaagggtaaaaatatggtagaacttggatctggaaactcttttcaaataccggatgagatgcgaagtgcgtgtaacaaagtattagatagtgataacggaatagactttctgagatttgttttgttaaacaatagatggataatggaagacgctatatcaaaatatcagtctccagttaatatatttaaactagcgagtgagtacggattaaacatacccaactatttagaaattgaaatagaggaagacacattatttgacgacgaattatactctattatagaacgctctttcgatgataaatttccaaaaatatccatatcgtatattaagttgggagaacttaggcggcaagttgtagactttttcaaattctcgttcatgtatattgagtcaatcaaggtagatcgtataggagataatatttttattcctagcgttataacaaaatcaggaaaaaagatattagtaaaagatgtagaccatttaatacgatccaaggttagagaacatacatttgtaaaagtaaaaaagaaaaacacattttccattttatacgactatgatgggaacggaacagaaactagaggagaagtaataaaacgaatcatagacactataggacgagactattatattaacggaaagtatttctctaaggttggtagtgcaggcttaaagcaattgactaataaattagatattaatgagtgtgcaactgtcgatgagttagttgacgagattaataaatccggaactgtaaaacgaaaaataaaaaaccaatcagcatttgatttaagtagagaatgtttgggatatccagaagcggattttataacgttagttaataacatgcggttcaaaatagaaaattgtaaggttgtaagtttcaatattgaaaatactaattgtttaaataacccgagtattgaaactatatatggaaactttaaccagttcgtctcaatctttaatgccgttaccgatgtcaaaaaaagattattcgagtgaaataatatgcgcctttgatataggtgcaaaaaatcctgccagaactgttttagaagtcaaggataactccgttagggtattggatatatcaaaattagactggagttctgattgggaaaggcgcatagctaaagatttgtcacaatatgaatacactacagttctcctcgaacgacaacctagacggtcgccgtacgtcaaatttatctattttattaaaggctttttatatcacacatcggctgccaaagttatttgcgtctcgcctgtcatgtctggtaattcatatagagatcgaaaaaagagatctgtcgaagcctttcttgattggatggacacattcggattacgagactccgttccagatagacgcaaattagacgatgtagcggatagtttcaatttggctatgcgatacgtattagataaatggaatactaattatacaccttataataggtgtaaatctagaaattacataaaaaaaatgtaataacgttagtaacgccattatggataatctattcacctttctacatgaaatagaagatagatatgccagaactatttttaactttcatctaataagttgcgatgaaataggagatatatatggtcttatgaaagaacgcatttcctcagaggatatgtttgataatatagtatataataaagatatacatcctgccattaagaaactagtttattgcgacatccaacttactaaacacattattaatcagaatacgtatccggtatttaacgattcttcacaagtgaaatgttgtcattatttcgacataaactcagataatagcaatattagctctcgtacagtagagatatttgagagggaaaaatcatctcttgtatcatatattaaaactaccaataagaagagaaaggtcaattatggggaaataaagaaaactgtacatggaggcactaatgcaaattacttttccggtaaaaaatctgacgagtatctgagtactacagttagatccaacattaatcaaccttggatcaaaaccatctctaagaggatgagagtcgatatcattaatcactctatagtaacgcgtggaaaaagctccatattacaaactatagaaattatttttactaatagaacatgtgtgaaaatattcaaggattctactatgcatattattctatccaaggacaaggatgaaaaggggtgtatacacatgattgacaaattattctatgtctattataatttatttctgttgttcgaggatatcatccaaaacgagtactttaaagaagtagctaatattgtaaaccacgtactcactgctacggcattagatgagaaattattcctaattaagaaaatggctgaacacgatgtttatggagttagcaatttcaaaatagggatgtttaacctgacatttattaagtcgttggatcataccgttttcccctctctgttagatgaggatagcaaaataaagttttttaaggggaaaaagctcaatattgtagcattacgatctctggaggattgtataaattacgtgactaaatccgagaatatgatagaaatgatgaaggaaagatcgactattttaaatagcatagatatagaaacggaatcggtagatcgtctaaaagaattgcttctaaaatgaaaaaaaacactgattcagaaatggatcaacgactcgggtataagtttttggtacctgatcctaaagccggagttttttatagaccgttacatttccaatatgtatcgtattctaattttatattgcatcgattgcatgaaatcttgaccgtcaagcggccactcttatcgtttaagaataatacagaacgaattatgatagaaattagcaatgttaaagtgactcctccagattactcacctataatcgcgagtattaaaggtaagagttatgacgcattagccacgttcactgtaaatatctttaaagaggtaatgaccaaagagggtatatccatcactaaaataagtagttatgagggaaaagattctcatttgataaaaattccgctactaataggatacgggaataaaaatccacttgatacagccaagtatcttgttcctaatgtcataggtggagtctttatcaataaacaatctgtcgaaaaagtaggaattaatctagtagaaaagattacaacatggccaaaatttagggttgttaagccaaactcattcactttctcgttttcctccgtatcccctcctaatgtattaccgacaagatatcgccattacaagatatctctggatatatcacaattggaagcgtcgaatatatcatcgacaaagacatttataacggtcaatattgttttgctatctcaatatttatctagagtgagtctagaattcattagacgtagtttatcatatgatatgcctccagaagttgtctatctagtaaacgcgataatagatagtgctaaacgacttaccgaatctattactgactttaatatcgatacatacattaatgacctggtggaagccgaacacattaaacaaaaatctcagttaacgattaacgagttcaaatatgaaatgctgcataactttttacctcatatgaactatacacccgatcaactaaagggattttatatgatatctttactaagaaagtttctctactgtatctaccacacttctagatatccggatagagattcgatggtttgtcatcgtatactaacatacggcaaatattttgagacgttggcacatgatgaattagagaattacataggcaacatccgaaacgatatcatgaacaatcacaagaacagaggcacttatgcggtaaacattcatgtactaacaactcccggacttaatcatgcattttctagtctattgagtggaaagttcaaaaagtcagacggtagttatcgaacacatcctcactattcatggatgcagaatatttctattcctagaagtgttggattttatccggatcaagtaaagatttcaaagatgttttctgtcagaaaataccatccaagtcaatatctttacttttgttcatcagacgttccggaaagaggtcctcaggtaggtttagtatctcaattgtctgtcttgagttccattacaaatatactaacgtctgagtatttggatttggaaaagaaaatttgtgagtatatcagatcatattataaagatgatataagttactttgaaacaggatttccaatcactatagaaaatgctctagtcgcatctcttaatccaaatatgatatgtgattttgtaactgactttaggcgtagaaaacggatgggattcttcggtaacttggaggtaggtattactttagttagggatcacatgaatgaaattcgcattaatattggagcaggaagattagtcagaccattcttggttgtggataacggagagctcatgatggatgtgtgtccggagttagaaagcagattagacgacatgacattctctgacattcagaaagagtttccgcatgtcatcgaaatggtagatatagaacaatttacttttagtaacgtatgtgaatcggttcaaaaatttagaatgatgtcaaaggacgaaagaaagcaatacgatttatgtgactttcctgccgaattcagagatggatatgtggcatcttcattagtgggaatcaatcacaattctggacccagagctattcttggatgtgctcaagctaaacaagctatctcttgtctgagctcggatatacgaaataaaatagacaatggaattcatttgatgtatccagagaggccaatcgtgattagtaaggctttagaaacttcaaagattgcggctaattgcttcggccaacatgttactatagcattaatgtcgtataaaggcatcaatcaagaggatggaattatcatcaaaaaacaatttattcagagaggcggtctcgatatagttaccgcaaagaaacatcaagtagaaattccattggaaaactttaataacaaagaaagagataggtctaatgcatattcgaaattagaaagtaatggattagttagactgaatgctttcttggaatccggagacgctatggcacgaaatatctcatcaagaactctcgaagatgattttgctagagataatcagattagcttcgatgtttccgagaaatataccgatatgtacaaatctcgcgttgaacgagtgcaagtagaacttactgacaaagttaaggtgcgagtattaaccatgaaagaaagaagacccattctaggagataaattcaccactagaacgagtcaaaagggaacagtcgcgtatatcgcggatgaaactgaacttccatacgacgaaaatggtatcacgccagatgtcattattaattctacatccatcttctctagaaaaactatatctatgttgatagaagttattttaacagccgcatattctgctaagccgtacaacaataagggagaaaaccgacctgtctgttttcctagtagtaacgaaacatccatcgatacatatatgcaattcgctaaacaatgttatgagcattcaaatccgaaattgtctgatgaagaattatcggataaaatcttttgtgaaaagattctctatgatcctgaaacggataagccttatgcatccaaagtattttttggaccaatttattacttgcgtctgaggcatttaactcaggacaaggcaaccgttagatgtagaggtaaaaagacgaagctcattagacaggcaaatgagggacgaaaacgtggaggaggtatcaagttcggagaaatggagagagactgtttaatagcgcatggtgcagccaatactattacagaagttttgaaagattcggaagaagattatcaagatgtgtatgtttgtgaaaattgtggagacatagcagcacaaatcaaaggtattaatacatgtcttagatgttcaaaacttaatctctctcctctcttaacaaaaattgataccacgcacgtatctaaagtatttcttactcaaatgaatgccagaggcgtaaaagtcaaattagatttcgaacgaagacctccttcgttttataaaccattagataaagttgatctcaaaccgtcttttctggcataatattgtttagtagatactcatcaatatcatcaagtttatcaagatcatcaagataagctaattcactaaacacatttttggattcggtattgttactcgcagaatagagttcgctataatcctgatattcggaaatctgtggagtttcaggttttggtggaggtgtaacagctacttgagataccgaagtctgatattcagaaagctgtggatgttctggttcggcatccaccgatggtgttacaccactactaattggttcagtaacgtcggacgatggaggcaccacttctacaggttttggttctgtatcctcagtcgtcaacggttctacttcaatgcgaggaaatgtataatttggtaatggtttctcgtctggatctgaagaagaggtaagatatctactagaaagataccgatcacgttctagttctcttttgtagaacttaactttttctttctccgcatctagttgatattccaacctcttcacgttactacgttcagattccaattcacgttcgcatgggttacctccgcagtttttacgagcgatttcacgttccagatcacgttcagccttcatgcgtctctccttctctctatcgagtttatcagcgcagtctttctgaagacgatcgaactccataaacttctccaaagatttgattgtttccatagatttccgaacttcagcttctaggacggcgattctttttctttcgaattcacagctggatgtgcaaccgtttcctccgtttccattaccaccatctctaagtttcttttctagatcggcaatctttctcaacatttcatccccatgccttttacattccgcgagtctactgtcgtcgaaatatctttccagctccttttcgacctcaataactttagcgcgttgtctctcaagctctctcttgtagtaactatcatttttatctgattccctggcacgtttaagatcttcatgcaattgagtcagctcttgacgcaatctcttaacttcctctcttgcttcttcgtcatagtacttacaatcactatgggatccattgttaccacgtctacactcggcgagctcgcgtttaagagattcaatttcccgtttgtattggtccatgtctccattgctaccaccattagatttacaggctgctagttgtcgttcgagatcagaaatacgggttttcttggaattgatttcgtcgatgtacttggcatgattggtatcgaaacacttattaagttctttttccaattctacgattttatttctttcacgagtcaattccctcctgtagtaactatcggttttgtcagattcacgctctctacgtagactttcttgcaggttactaatttgttcccttgcacgtccgagttcactcttatatgctgaatagagttctgattcatcctttgagcagatctctagagatcgttcaagatccctgattctagtctttagcctatttacctcctcagaagatgttccgttaccgtcgcgtttacattcgttaagctgtctatcaagatccatgattctatctctaagacgttgcatctctctttccatatcagcattgctttcattattacgtctgcagtcactcaactgcctttcaagatccgtgattctatctctaagacgttgcatctctctttctgtatcggcattgttctcattattacgtctacagtcgttcagttgtctttcaagatctgtgattctatattggagtctgctaatctctgtagcatttccacggcattcacgcagttgtctttcaagatctgagattttagattggagtctgctaatctctgtgagatttcctcctccgctttccatgcagtcggccaacttattctccagttctctaatacgcgaacgcagtgcatcaacttcttgcgtgtcttcttgattgcgtgtacattcatcgagtctagattcgagatctctaacgcgtcgtcgttcttcctcaagttctctgcgtactacagaaagcgtgtccctatcttgttgatatttagcaatttctgattctagagtactgattctgctcacgtagttactaatagttgttttggccttatcaagatcctccttgtatttgtcgcattccttgatatccctacgaagtctggacagttcccattcgacattacgacgtttgtcaatttcagctctgagatcgtcatcgcgttgttttagccacatacgactgagttcaagttctcgttgacaagatccttctacctttccatccctaatagtatccagttccctttctagttctgtgcgcatttctcgttcccgatcaagtgattctctcaattctcggatagtcttcttatcaatttctgatgaatctgaaccatcatctgtcccattttgaatatccctgagttctttgatctcttttgtaagtcggtcgattctttcggttttataaacagaatccctttccaaagtcctaatcttactgagtttatcactaagttctagattcaattcggtgagttttctcttggcttcttccaactctgtcttatactctccaccatttccgcattcttcctcgcatttatctaaccattcaattagtttattaatgactagttggtaatcagcgattcctaaaaccgtttttgtaattgtgggaacataatcaggatcttcaaatggattgtatggcgtgattccatcatcaggtttagactggacaaccttaactggttgttgttcttgttcttccttatctcctccagtagcgtgcggttcttcaataccagtgttagtaataggcttaggcaaatgcttgtcgtaagctggtacttcctcatccatcaagtatttataatcgggttctacgtctgaatattcttttctaagagacgcaacttctggagttagtagaagaactctgtttctgtatctatcaacgctggaatcaatactcaagttaaggatagcgaatacctcatcgtcatcatccgtatcctctgaaacgccatcatatgacatttcatgaagtctaacgtattgataaacagaatcagatttagtattaaacagatccttaacctttttagtaaatgcatatgtatattttagatctccagatttcataatatggtcgcatgccttaaatgtaagtgcttccataatatagtctggaacactaattggtgatgaaaaagatgccggaccatatgctacgttgataaataactctgagccactaactagtagataatgattaatgttaaggaaaagaaaatattcagtgtatatgaatgtcttggcgtcatatcttgtactaaacacgctaaacagtttgttaatctgatcaatttccaatagattaattagagcagcaggaataccaacaaacatattaccacatccgtattttctatgaatatcacatatcatgttaaaaaatcttgatagaagagcgaatatctcgtctgacttaatgagtcgtagttcagcagcagcataagtcataactgtaaatagaacatactttcctgtagtgttgattctagactccacatcaacaccattattaaaaatagttttatatacatctttaatctgctctccgttaatcgtcgaacgttctagtatacggaaacactttgatttcttatctgtagttagtgacttagtgatatcacgaagaatattacgaattacatttcttgtttttcttgagagacctgattcagaactcaactcatcgttccatagtttttctacctcagtggcgaaatctttggagtgcttggtacatttttcaataaggttcgtgacctccatttattataaaaaaattttattcaaaacttaactacaatcgtgtaattataagatcgtagatctcccatgtggcggaatactaccatctatcgcatgtggatggacagtaggtaatggccatgggaacagtaatgtttgcatatttatctttcttgctagtattactgcatattgtcccaatgtttcaatgtgatgttctaacctatcaactgctgctgtatcacaacaatagtgtccgatggaattaagattatgatccaatgtgtttaatatatgattatcaagtcttatacgatccgcgtcttttttgacaggatcaggttcttctacaggaagaactttcggcctcttatgatattcatgtctgggaaacggtggtctagggtgaggctccggtatcggagtgggttttggattataatcatcatcgtctatgacatcatcatcatcatcatcatcatcatcatcatcatcatcatcatcatcatcatcatcatcatcatcatcatcatcatcatcatcatcttcaacttcgatatttattttgctatcttgatgatgtcctgtatcagttgcattttcagcacttgactgaatattagcgcattcattgtctattattaccatatttctaaatccaaaatgtatatgttgagcatcagtactatcgttgatgagtcttatagcatgaattcgcttatcgttatcgggtttatcttctgtcaccttagcaattccttttttattaaactctacataatcataaccatttctattgtttgttctaatataaacgagtatagcatcattgctaaatttttcaatagtatcgaaaacagaatatcctaaaccatataatatatatcaggaacactcaaactaaatgtccaggattctcctaaatacgtaaactttaatagtgcgaaatcattcaaaaatctaccacttatagatagatagtacatgaatgcgtatagtagtctacttatctctctattatgaaacccgacattaccatcatatatttcgcgatatacatgtgctccgtttacgttaaaccataaatacatgggtgatcctataaacatgaatttatttctaattctcagagccatagttaattgaccgtgtaatatttgcttacatgcatacttgatacgatcattaataagagttttatcattgctcgttatttcagaatcgtatatataaggagtaccatcgtgattcttaccagatattatacaaaatactatatataaaatatattgacccacgttagtaatcatgtaaatgtttaacgttttaaactttgtattcaatgatccattatcatacgctagcatggtcttgtaatattcattctttacaatataatattgtgttagccattgcattggggctcctaatggagattttctattctcgtccattttaggatatgctttcataaagtccctaataacttcgtgaataatgtttctatgttttctactgatgcatgtatttgcttcgatttttttatcccatgtttcatctatcatagttttaaacgcagtaatgctcgcaacattaacatcttgaaccgttggtacaattccgttccataaatttataatgttcgccatttatataactcattttttgaatatacttttaattaaacaaaagagttgagtttattcatatggtcgccgtccagtctgaacatcaatctttttagccagagatatcatagccgctcttagagtttcagcatgattttccaacctaaatagaacttcatcgttgcgtttacaacacttttcgatttgttcaaactttgttgttacattagtaatctttttttccaaattagttagtcgttgtttgagagtttcttcattgtcatctccctcagctttaacaattgcttcgcgtttagcctctggcttcttagcagcctttgtagagaaaaattcagtcgctggaattgcaagatcgtcatctccggggaaaagagttccgtccatttaaagtacagattttagaaactgacactctgcgttatttatatttggtgcaacacatggattataaatatcgatgttaataacatcagaaaatgtaaagtctatgcattgttgcatcgtgttaaattttctaatggatctagtattattgggtccaacttctgcctgaaatccaaatacggaagcggatacaaaaccatttcctggataagtaacacatctccacttttgctttacatcagaaatagtgtcattgacatcttgaactctcctatctaatgccggtgtaccacctatagatttcgaatattcgaatgctgcatgcgtcgcattaaattccttaatattgccataattttcatatattgagtaaccctggataaaaagtaaacacactgcagccgttgctaccacaataaaaaaaattgatagagagttcatttataatctattagaagctgacaaaatttttttacacgcatcagacaatgctttaataaatagttcaacatctacttttgtcatatcgaaccgatggtatgattctaacctagaattacatccgaaaaagttgactatgttcatggtcattaagtcattaacaaacaacattccagactctggattataagacgatactgtttcgtcacaatcacctaccttaatcatgtgattatgaatattggctattagagcaccttctaagaaatctataatatctttgaaacacgatttaaaatcaaaccacgaatatacttctacgaagaaagttagtttacccataggagagataactataaatggagatctagatacaaaatccggatctatgatagttttaacattattatattctctattaaatacctccacatctaaaaatgttaattttgaaactatgtcttcgcttattaccgtacctgaactaaacgctataagctctattgtttgagaactctttaaacgatattcttgaaatacatgtaacaaagtttcctttaactcggtcggtttatccaccatagttacagaattagtatccttatctataatataataatcaaaatcgtataaagttatataattatctcgttcagattgtgatcttttcaaatagactaaaaatcccatttctctagtaagtatcttatgtatatgtttgtaaaatatcttcatggtgggaatatgctctacagcagttagccattcctcattgactgcggtagatgtattatacaaaactattccaatgtttaacaagggccattttacgagattattaaatccttgtttgataaatgtagccaatgagggttcgagttcaacgacgattgaattctcttcccgaggatgcggcatgataaacgggatgttgttcgattgatttggaattctttttcgactttttgtttatattaaatattttaaaatttatagctgatagcaattcatgtactacggataatgtagacgcgtattgtacatcgatatctttattattagataaatttatcaataaatgtgagaagtttgcctcgttaaggtcttccatttaaatattatataaacatttgtgtttgtatcttattcgtcttttatggaatagttttttactagtaaagctgtaattacatactttgtccgtaaaacataaatataaacacccgcttttatcaaacgttccaaaaagtcgacggcggacatttttaacatggcatctattttaaatacacttaggtttttagaaaaaacatcattttataattgcaacgattcaataactaaagaaaagattaagattaaacataagggaatgtcatttgtattttataagccaaagcattctactgttgttaaatacttgtctggaggaggtatatatcatgatgatttggttgtattggggaaggtaacaattaatgatctaaagatgatgctattttacatggatttatcatatcatggagtgacaagtagtggagcaatttacaaattgggatcgtctatcgatagactttctctaaataggactattgttacaaaagttaataattataataattataataattataataattataataattataataattataattatgacacattttttgacgatgatgattgatcgctattgcacaattttgtttttttactttctaatatagtgtttagattctttttcatgtgcgaatattgatttactaaaatatctatgtttaacttttgttctatgacgtccttatcggcggtatcggtacatatacgtaattcaccttcacaaaatacggagtcttcgataataatagccaaacgattattggatctagccgtctgtatcatattcaacatatttaatatatcctttcgtttcccctttacaggcatcgatcgtagcatattttcagcgtctgagatggaaatgttaaaactacaaaaatgcgtaatgttagcccgtcccaatattggtacgtgtctataagtctggcatagtagaataatagacgtgttcaaatgccttccgaagtttaagaattctattagagtattgcattttgatagtttatcacctacatcatcaaaaataagtaaaaagtgtgctgattttttatgattttgtgcaacagcaatacatttttctatgttacttttagttcgtatcagattatattctagagcttcctgactactaacgaaattaatatgatttggccaaatgtatccatcataatctggattataaacgggtgtaaacaagaatatgtgtttatattttttgactagtgtagaaaacagagatagtaaatagatagtttttccagatccagatcctcccgttaaaaccattctaaacggcatttttaataaattttctcttgaaaactgtttttcttggaaacaattcataattatatttacagttactaaattaatttgataataaatcaaaatatggaaaactaaggtcgttagtagggaggcaaacaaagaaggcacattgtgatataaataatatttattatttattatcatgatgacaccagaaaacgacgaagagcaaacatctgtgttctccgctactgtttacggagacaaaattcagggaaagaataaacgcaaacgcgtgattggtctatgtattagaatatctatggttatttcactactatctatgattaccatgtccgcgtttctcatagtgcgactaaatcaatgcatgtctgctaacgaggctgctattaccgacgctgctgttgccgttgctgctgcatcatcatctaccaatagaaaggttgctgcttctagcactacacaatatgatcacaaagaaagctgtaatggtttatattaccagggttcttgttatatattccattcagactacaagtcattctcggatgctaaagcaaactgcactgcggaatcatcaacactacccaataaatccgatgtcttgactacctggctcattgaatatgttgaggatacatggggatctgatggtaatccaattacaaaaactacatccgattatcaagattctgatgtatcacaagaagttagaaagtatttttgtgttaaaacaatgaactaatatttatttttgtacataaataaatgaaatcgcttaatagacaaactgtaagtaggtttaagaagttgtcggtgccggccgccataatgatgatactctcaaccattattagcggcataggaacatttctgcattacaaagaagaactgatgcctagtgcttgcgccaatggatggatacaatacgataaacattgttatctagataccaacattaaaatgtccacagataatgcagtttatcagtgtcgtaaattacgagctagattgcctagacctgatactagacatctgagagtattgtttagtattttttataaagattattgggtaagtttaaaaaagaccaatgataaatggttagatattaataatgataaagatatagatattagtaaattaacaaattttaaacaactaaacagtacgacggattctgaagcgtgttatatatacaagtctggaaaactggttaaaacagtatgtaaaagtactcaatctgtactatgtgttaaaagattctacaagtgacaacaaaaaatgaaataataataggcctttaacgaacgccgccatggacgccgcgtttgttattactccaatgggtgtgttgactataacagatacattgtatgatgatcttgatatctcaatcatggactttataggaccatacatcataggtaacataaaaactgtccaaatagatgtacgggatataaaatattccgatatgcaaaaatgctactttagctataagggtaaaatagttcctcaggattctaatgatttggctagattcaacatttatagcatttgtgctgcatacagatcaaaaaataccatcatcatagcatgcgactatgatatcatgttagatatagaaggtaaacatcagccattttatctattcccatctattgatgtttttaacgctacaatcatagaagcgtataacctgtacacagctggagattatcatctgatcatcaatccttcagatgatctgaaaatgaaattgtcgtttaattcttcattctgtatatcagacggcaatggatggatcataattgatgggaaatgcaatagtaattttttatcataaaagttgtaaagtaaataacgcaacaaatattgaactagtagtacgtatattgagcaatcagaaatgatgctggtaccacttgtcacagtgaccgtagttgcgggaacaatattagtatgttatatattatatatttgtaggaaaaagatacgtactgtctataatgacaataaaattatcatgacaaaattaaaaaagataaagagttctaattccagcaattctagtaaatcaaccgatagcgaatcagactgggaggatcactgtagcgccatggaacaaaataatgacgtagataatatttctaggaatgagatattggacgatgatagctttgctggtagtttaatatgggataacgaatccaatgttgtggcgcctagtacagaacacatttacgatagtgttgctggaagcacgctgctaataaataatgatcgtaatgaacagactatttatcagaacactacagtagtaattaatgagacggagactgaagtacttaatgaagataccaaacagaatcctagctattcttccaatcctttcgtaaattataataaaaccagtatttgtagcaagtcaaatccgttcattacagaactcaacaataaatttagtgagaataatccgtttaggagagcacatagcgatgattatctaaataagcaagaacaagatcgtgatcaagatcataaacatgattatatagaatcatcggttgtatcattggtctgattagtttcctttttataaaattgaagtaatatttagtattaattgctgccgtcgcattgtacaaatatggagatattccctgtattcggcatttctaaaattagcaattttattgctaataatgactgtagatattatatagatgcagaacatcaaaaaattatatctgatgagatcaatagacagatggacgaaacagtacttcttaccaacatcttaactgtagaagttgtaaatgataatgagatgtaccatcttattccccatagactatcgactattatactctgtattagttctgtcggaggatgtgttatctctatagataatgacatcaatgacaaaaatattctaacatttcccattgatcatgctgtaatcatatctccactgagtaaatgtgtcgtagttagcaagggtcctacgaccatactggttgttaaagcggatatacccagcaaacgattggtaacatcatttacaaacgacatactgtatgtaaacaatctatcactgattacttatttgcctttgtctgtattcatcattagacgagtcaccgactatttggatagacatatatgcgatcagatatttgctaataataagtggtattccattataaccatcgacgataagcaatatcctattccatcaaactgtataggtatgtcttctgctaagtacataaattcgatcatcgagcaagatactttaatccatgtttgtaacctcgaacatccattcgacgccgtgtacaaaaaaatgcagtcttacaattctctacctatcaaggaacaaatattgtacggtagaattgataatataaatatgagcattagtatttctgtcaattaatagatttctaggtacgaatcattaatcatctctaatctcgaaatacctccataaaacgaaaatgctgctacaaatgaaaaaaaagctgttactaaatactattcagaatgaattcattcttctcttctctttttatgaaactctgttgtatatctactgataaaactgggagcaaagaatctgatagaaagaataagaataagatcaaggattatatggaacatgattattataaaatagtaatagtccccggttcctcttccacgtctactagctcgtggtattatacacatgcctagtaatagtctctttgcgttgacggaaagcagactagaaataacaggctaaaatgttcagacaccataatagttcccaacccagataataacagagttccatcaacacattcctttaaactcaatcccaaacccaaaaccgttaaaatgtatccagccaattgatagtagataatgaggtgtacagcgcatgataatttacacagtaaccaaaatgaaaacactttagtaattataagaaatatagatggtaacgtcatcatcaacaatccaataatatgtcggagagtaaacattgacggataaaacaaaaatgctccgcataactctaccatggcaataacacaaccaaatacttgtaagattcctaaattagtagaaaatacaactgatatcgatgtataagcgatttcgagaaataataagaataaagtaatgcctgtaaagataaacatcaacattgtttggtaatcattaaaccaattagtatgacgttgaactaatttcacagtagattttattccagtgttatcctcgcatgtatacgtacctggtaagatatctttatattccataatcaatgagacatcactatccgataacgaatgaagtctagcactagtatgccatttacttaatatggtcgtcttggaagttttattataagttaaaatatcatggttgtccaatttccatctaatatactttgtcggattgtctatagtacacggaataataatggtatcattacatgctgtatactctatggtctttgtagttgttataacaaccaacgtatagaggtatatcaacgatattctaactcttgacatttttatttatttaaaatgatacctttgttatttattttattctattttgctaacggtatcgaatggcataagtttgaaacgagtgaagaaataatttctacttacttattagacgacgtattatacacgggtgttaatggggcggtatacacattttcaaataatgaactaaacaaaactggtttaactaataataattatataacaacatctataaaagtagaggataaggatacattagtatgcggaaccaataacggaaatcccaaatgttggaaaatagacggttctgaagatccaaaacatagaggtaggggatacgctccttatcaaaagagcaaagtaacgataatcagttacaacggatgtgtactatctgatataaacatatcaaaagaaggaattaaacgatggagaagatttgacggaccatgtggttatgatttatacacggcagataacgtaattccaaaagatggtgtacgaggagcattcgttgataaagacggtacctatgacaaagtttacattcttttcaccgatactataggctcaaagagaattgttaaaattccgtatatagcacaaatgtgcctaaacgacgaaggtggtccatcatcattgtctagtcatagatggtcgacgtttctcaaagtagaattagaatgtgatatcgatggaagaagttatagacaaattattcattctaaaactataaaaacggataatgatacgatactatatgtattcttcgatagtccttattccaagtccgcattatgcgcctattcgatgaattccattaaacaatcttttactacgtcaaaattggaaggatatacgaagcaattgccgtctccagctcctggtatatgtctaccagctggaaaagttgttccacataccacgtttgaagtcatagaaaaatataatgtactagatgatattataaagcctttatctaaccaacctatcttcgaaggaccatctggagttaaatggtttgatataaaggagaaggaaaatgaacatcgggaatatagaatatacttcataaaagaaaatactatatattcgttcgatacaaaatctaaacaaactcgtagtgcacaagttgatgcgcgactattttcagtaatggtaacttcgaaaccgttatttatagcagatatagggataggagtaggaatgccacgaatgaaaaaatacttaaaatgtaatcttatcgagtacacacaacaatgaacaaacctaagacagattatgctggttatgcttgctgcgtaatatgcggtctaattatcggaattatttttacagcgacactaataaaaacaatagaacgcaaggtagtaattaatacaccatcaatagataaaacgataaaagatgcatacatcagagaagactgtcctgctgactggataagctataataataaatgtatccatttatctactgatcgaaaaacctgggaggaaggacgtaatgcatgcaaagctctaaatccaaattcggatctaattaagatagagactccaaacgagttaagttttttaagaagccttagaagtggctattgggtaggagaatccgaaatattaaaccagacaaccccatataattttatagctaagaataccacaaagaatggaactaaaaaacggaaatatatttgtagcacaactaatatccccaaactgcattcgtgttacactatataataatacataaaactatgctacatttttatcataacactatttctgttagatggtttagaaaaaaataaatatcgccgtaccgttcttgtttttataaaaataacaattaacaactatcaaattttttctttaatattttacgtggttgaccattcttggtggtaaaataatctcgtagtgttggaatggaatgctgtttaatgtttccgcactcatcgtatattttgacgtatgcagtcacatcttctacgcaatagtcagactgtagttcgatcatacttcctacattagaaggaggaacagttttaaagtctcttggttttaatctattgccgtttttcatgaaatcctttgttttatccacttcacattttaaataaatgtccactatacattcttctgttaattttactagatcgtcatgggtcatagaatttataggttccgtagatggatccaaactagcaaacttcgcgtatacggtatcgcgattagtgtatacaccaactgtatgaaaattaagaaaacagtttaatagatcaacagaaatatttaatcctccgtttgatacagatgcaccatatttatggatttcggattcacacgttgtttgtctgaggggttcgtctagcgttgcttctacataaacttctattcccatatattctttattgttagaatcgcataccgatttatcatacgctggttcacttgtttgaaaactaaatggtagacccatcaaaataataaataatgagtacattctgcaatattgttatcgtaattggaaaattagtgttcaagtgagtcggattatgtgagtactggattgtatattttattttatattttatattttgtagtaagaatagaatgctaatgacaagtttattacaatagatgtcttattaaaaaacatatataataaataacaatggctgaatggcataaaattatcgaggatatctcaaaaaataataagttcgaggatgccgccatcgttgattacaagactacaaagaatgttctagctgctattcctaacagaacatttgccaagattaatccgggtgaaattattcctctcatcactaatcgtaatattctaaaacctcttattggtcagaaatattgtattgtatatactaactctctaatggatgagaacacgtatgctatggagttgcttactgggtacgcccctgtatctccgatcgttattgcgagaactcataccgcacttatatttttgatgggtaagccaacaacatccagacgtgatgtgtatagaacgtgtagagatcacgctacccgtgtacgtgcaactggtaattaaaatgaaaagtaatattcatgtgtagtgtcaattttaaatgatgatgatgaaatggataatatccatattgacgatgtcaataatgccggtattggcatacagctcatcgatttttagatttcattcagaggatgtggaattatgttatgggcatttgtattttgataggatctataatgtagtaaatataaaatataatccgcatattccatatagatataattttattaatcgcacgttaaccgtagatgaattagatgataatgtcttttttacacatggttattttttaaaacataaacatggttcacttaatcctagtttgattgtctcattatcaggaaacttaaaatataatgatatacaatgttcagtaaatgtatcgtgtcttattaaaaatttggcaacgagtacatatactatattaacatctaaacacaagacttattctctacatcggtccaagtgtattattataataggatacgattctattctatggtataaagatatatatgacaagtataatgacatctatgattttactgcaatatgtatgctgatagcttctacattgatagtgtcaatatacgtgtttaaaaaaataaaaatgaactcttaattatgctattagaaatggataaaatcaaaattactgttgattcaaaaattggtaatgttgttaccatatcgtataacttggaaaagataactattgatgtcacaccaaaaaagaaaaaagaaaaggaggtgttggtacaagtgattaacgctgacgaggcaaaagatgttaaagaggaagaaaaaaatattattgatattactgatgacgatggtatggatgtagagagttctgtgatctacgaataaaataagtattgattaatactttatactttttatttacggtattcctactgtgtagtgctacctactcgattatttttttaaaaaaatacttattctgattctagccatttccttgttcgttcgaatgccacatcgacgtcaaatataggggagtagttgaaatctagttctgcattgttggtacgcacctcaaatgtagtgttgtatatcttcaatgtatagttgttaagtagtgatggtttcctaaatagaattctcttcatatcattcttgcacgcgtacatttttagcatccatcttggaatcctagatccttgttctattcccaatggtttcatcaatagaagattaaacatatcgtacgaacacgatggagagtaatcgtagcaaaagtaagcatttcctttaatctcagatcccggatactggatatattttgccgccaacacatgcatccatgcaacatttcctacatatacccggctatgcaccgcatcatcatcgactgtacgatacatgatgttaccgtgttgcttacattgctcgtaaaagactttcgtcaatttgtctccttctccgtaaattccagtgggtcttagacaacaagtatacaactttgctccattcatgatcacggaattattggctttcataaccagttgctcggccatacgtttactttttgcgtatacatgtcctggtgatatatcataaagggtatgctcatggccgatgaatggatcaccgtgtttatttggtcctattgcttccatgctactagtatagatcaaatacttgattcctaggtccacacaagctgccaatatagtctgtgttccataatagtttactctcatgatttcattattagtgtattttccaaatacatccactagagcagccgtatgaataatcagatttaccccatctagtgcctctctcaccttatcaaagtcgtttatatcacattgtatgtaatttataaccttaacctttgatgtgagtggttgtggatcttctgcaacatcgataactctgatttcctgaacatcatctgcactaattaaaagttttactatatgcctgcctagaaatccggcaccaccagtaaccgcgtacacggccattgctgccactcgtaataacagactacttattctattttactaaataatggctgtttgtataatagatcacggtaatatcagaggagttatttactttgaaccagtccatggaaaagataaagttttaggatcagttattggattaaaatcaggaacgtatagtttgataattcatcgttacggagatattagtcgaggatgtgaatccataggcagtccagaaatatttatcggtaatatctttgtaaacagatatggtgtagcatatgtttatttagatacagatgtaaatatatctacaattatcggaaaggcgttatctatttcaaaaaatgatcagagattagcgtgtggagtcattggtatttctttcataaatgaaaagataatacattttcttacaattaatgagaatggcgtttgatatatcagttaatgcgtctaaaacaataaatgcattagtttacttttctactcagcaaaataaattagtcatacgtaatgaagttaatgatacacactacactgtcgaatttgatagggacaaagtagttgacgcgtttatttcatataatagacataatgactccatagagataagaggggcgcttccagaggaaactaatattggttgcacggttaatacgccggttagtatgacttacttgtataataagtatagttttaaactgattttagcagaatatataagacacagaaatactgtatccggcaatatttattcggcattgatgacactagatgatttggctattaaacagtatggagacattgatctattatttaatgagaaacttaaagtagactccgattctggactatttgactttgtcaactttgtaaaggatatgatatgttgtgattctagaatagtagtagctctatctagtctagtatctaaacattgggaattgacaaataaaaagtataggtgtatggcattagccgaacatatagctgatagtattccaatatctgagctatctagactacgatacaatctatgtaagtatctacgcggacacactgagaccatagaggatgaatttgattattttgaagacgatgattcgtctacatgttctgccgtaaccgatagggaaacagatgtataattttttttatagtgtgaagaatatgataaaaaatataattgttgtatccattcccattccaatcacattatatgattctgtaaaaaaaattatactgtaacacagtgaaggagtctcatagatgtatagaggtcagatactggtttgataaactttttattccacatgagtatgtttgactttatggttagacccgcatactttaacaaatcactgaaaattggagttagatattgacctctcagaatcagttgccgttctggaacattaaatgtattttttatgatatactccaacgcatttatgttggcatacaacaagtcattactaatggagtattccaagagttttaattggctagtatttagcaagagaagagatttcaacagactgtttatgaactcgaatgccgcctcattgtcgcttatattgatgatgtcgaattctcctaatatcatcactgatgagtagctcatcttgttattgggatccaagctttctaaagatgtcattaaaccctcgatcatgaatggatttatcatcatcgtttttatgttggatatgagcttagtccgtttgtccacatctatagacgatgatttctgaattattgcatatatctctctctttaactccaggaacttgtcaggatgatctactttaacatgttctcgtctaagagatgaaaatctttggatggttgcacgtgacttttctctaaaggatgatgttgcccaagatcctctcttaaatgaatccatcttatccttggacaagatggacagtctattttccttagatggtttgatatttttattacccatgatattctataaaggtagacctaatcgtctcggatgacctatatatttattttcagttttattatacgcataaattgtaaaaaatatgttaggtttacgaaaatgtctcgtggggcattaatcgtttttgaaggattggacaaatctggaaaaacaacacaatgtatgaacatcatggaatcgataccttcaaacacgataaaatatcttaactttcctcagagatccacggtaactggaaagatgatcgatgattatctaactcgtaaaaaaacctataatgatcatatagttaatctattattttgtgcaaatagatgggagtttgcatcttttatacaagaacaactagaacagggaattactttaatagttgatagatacgcgttctctggagtagcgtatgctgccgctaaaggcgcgtcaatgactctgagtaagagttatgaatctggattgcctaaacccgacttagttatattcttggaatctggtagcaaagaaattaatagaaacgtcggcgaggaaatttatgaagatgtcgcattccaacaaaaggtattacaagaatataaaaaaatgattgaagaaggagatattcattggcagattatttcttctgaattcgaggaagatgtaaagaaggagttgattaagaatatagttatagaggctatacacacggttactggaccagtggggcaactgtggatgtaataaagtgaaattacattttttataaatagatgttagtacagtgttagaaatggatgaagcatattactctggtaacttggaatcggtactcggatacgtgtccgatatgcataccgaactcgcgtcaaaatctcaactaatcattgcaaagatagaaactatagataatgatatattaaacaacgacattgtaaattttatcatgtgtagatcaaacttggataatccatttatctctttcctagatactgtatatactattatagatcaagagaactatcagactgagttgattaattcattagacgacaatgaaattatcgattgtatagttaacaagtttatgagcttttataaggataacctagaaaatatagtagatgctatcattactctaaaatatataatgaataatccagattttaagactacgtatgccgaagtactcggttccagaatagccgatatagatattaaacaagtgatacgcaagaatatactacaattgtctgatgatatccgcgaacgatatttgtgaaaatatttaaaaaaaaatacttttttattaaatgacgtctcttcgtgaatttagaaaattatgccgtgatatatatcacgcatcaggatataaagaaaaatctaaattaattagagactttataacagatagagatgctacagatacgtatttgatcattaagctgttgcttcccggattagatgatagaatttataacatgaacgataaacaaattataaaattatatagtataatatttaaacaatctcaggaagatatgctacaagatttaggatacggatatataggagacactattagtacattcttcaaagagaacacagaaatccgtccaaaagataaaagcattttaactttagaagaagtggatagtttcttaactacattatcatccgtaactaaagaatcgcatcaaataaaattattgactgatatcgcatccgtttgtacatgtaatgatttaaaatgtgtagtcatgcttattgataaagatctaaaaattaaagcgggtcctcggtacgtacttaacgctattagtcctaatgcctatgatgtgtttagaaaatctaataacttgaaagagataatagaaaatgcatctaaacaaaatctagactctatatctatttctgttatgactccaattaatcccatgttagcagaatcatgtgattctgtcaataaggcgtttaaaaaatttccatcaggaatgtttgcggaagtcaaatacgatggtgaaagagtacaagttcataaaaataataacgagtttgccttctttagtagaaacatgaaaccagtactctctcataaagtggattatctcaaagaatacataccgaaagcatttaaaaaagctacgtctatcatattggattctgaaattgttcttgtagacgaacataatgtaccgctaccgtttggaagtttaggtatacacaaaaagaaagaatataaaaactctaacatgtgtttgttcgtgtttgactgtttgtactttgatggattcgatatgacggacattccattgtacgaacgaagatcttttctcaaagatgttatggttgaaatacccaatagaatagtattctcagagttgacgaatattagtaacgagtctcagttaactgacgtattggatgatgcactaacaagaaaattagaaggattggtcttaaaagatattaatggagtatacgaaccgggaaagagaagatggttaaaaataaagcgagactatttgaacgagggttctatggcagattctgcagatttagtagtactaggtgcttactatggtaaaggagcaaagggtggtatcatggcagtctttctaatgggttgttacgacgatgaatccggtaaatggaagacggtaactaaatgttccggacacgatgataatacgttaagagttttgcaagaccaattaaagatgattaaaattaacaaggatcccaaaaaaattccagagtggttggtagttaataaaatctatattcccgattttgtagtagaggatccaaaacaatctcagatatgggaaatttcaggagcagagtttacatcttccaagtcacatacagcgaatggaatatcgattagatttcctagatttactaggattagagaagataaaacgtggaaagaatctacgcatctaaacgatttagtaaacttgactaaatcttaatagttacacacaaactgaaaattaaaataacactatttagttggtggtcgccatggatggtgttattgtatactgtctaaacgcgttagtaaaacatggcgaggaaataaatcatataaaaaatgatttcatgattaaaccatgttgtgaaagagtttgtgagaaagtcaagaacgtacacatagacggacaatctaaaaacaatacagtgattgcggatttgccatatctggataatgctgtatcggatgtatgcaaatcaatatataaaaagaatgtatccagactatccagatttgctaatttgataaagatagatgacgatgacaagactcctaccggtgtatataattattttaaacctaaagatgctattcctgttattatatccataggaaaagataaagatgtctgtgaactattaatctcatctgataaagcgtgtgcgtgtatagagttaaattcatatcacgtagccattcttcccatgaatgtttccttttttaccaaaggaaatgcatcgttgattattctcctgtttgacttctctatcgatgcggcacctctcttaagaagtgtaaccgataataatgtggttatatctagacacagacgtctacatgacgagcttccgagttccaattggttcaagttttacataagtataaagtctgactattgttctatcttatatatggtagttaatggatctgtgatgtatgcaatagctaataatagaactcacgcaattattagcaaaaatatattagacaataccacaattaacgatgagtgtagatgctgttattttgaaccacagattaagattctcgatagagatgagatgctcaatggatcatcgtgtgatatgaacagacattgtattatgatgaatttacccgatgtaggcgaatttggatctagtatattggggaaatatgaacctgacatgattaagattgctctttcggtcgcaggtagtttaataagaaatcgagactacattcctggaagacgaggctatagctattacgtttacggtatagcctctagataattttttttaagtacgaaataaaaacataattttaaactagtctatttcatactattttatgtgatcaccatggacataaagatagatattagtatttctggcgacaaagttacagtgactactaggagggaaaacgaagaacgaaaaaaatatctacctctccaaaaagaaaaaactactgatgttatcaaacctgattatcttgagtacgatgacttgttagatagagatgatatgtctactattctagaggaatattttatgtaccgaggtctattaggcctcagaataaaatatggacgactctttaacgaaattagaaaattcgacaatgatgcggaagaacaattcggtactatagaagaactcaaacagaaacttagattaaactctgaagagggagcagataactttatagattatataaaggtacaaaaacaggatattgtcaaacttactgtgtatgattgcatatctatgataggattgtgtgcgtgtgtggtagatgtttggagaaaggagaaactgttttctagatggaaatattgtctacgagctattaaactgtttatcgatgatcacatgcttaataagataaaatctatactgcagaatagattagtgtatgtggaaatgtcatagaaagtgagcaaaaattataaggttgtattctaatcccatatttgttatttttttctgtaatagttagaaaaatacattcgatggtctatctaccagattattatgtgttataaggtactttttctcataataaactagagtatgagtatgatagtgttttttcaaaacatataaatctaaaattgatggatgtgttacagctattaatttcgaaaaatatattttaatctgataactttaaacatggatttttgatgacatagtggtttaaagtttaaacagatttttttattgtagtattatatgataatatcaaaacgatggatataaagaatttgctgactgtatgtactattttgtacatcagtacattggttacagcagatatacctacttcgtcactgccacacgctccggtaaacgggtcatgtgacgacggagaatatcttgataagacgcataatcaatgttgtaatcggtgtccacctggagaatttgccaagatcagatgtagcggtagcgataacacaaaatgtgaacgctgcccacctcatacatataccacagtacccaattattctaatggatgtcatcaatgtaggaaatgcccaacaggatcatttgataaggtaaagtgtaccggaacacagaacagtaaatgttcgtgtcttcctggttggttttgcgctactgattcttcgaagactgaagattgtcgagattgtataccaaaaagaaaatgtccatgtggatactttggtggaatagatgaactcggaaatcctctttgtaaatcgtgttgtgttggtgaatattgcgacgacatacgtaatcatagagttggtccttttcctccatgcaaactatctaaatgtaattagccatgatcatgttaccatacatcatatcgctacttggtagcgtattattcagtatgaagatctattaataataattatcttatttatttcttgatattaatcggtgtcctaataatataaaatacttatggaaataaattgtaaacaagatgaattaatacacaatacatccttatactcagcttgttcaaattttataaagaatcatattcattaggcatataataaaaaatataatttataatacacttacagcgtcatcatgcataacagcagtgaattaattgctgttattaatggatttagaaatagtggacgattttgtgatattaatatagttattaatgatgaaaggataaacgctcatagactcatgctatctggagcatccgaatatttttccattctattttctagtgattttatcgattctaatgactacgaagttaatctaagtcatttagattatcaaagtgtgaacgatttgatcgattacatttatgggatacctttgagcctaactaacgataacgtgaaatatattctttcaaccgctgattttttacaaattggatctgccattactgagtgcgaaaaatacatacttaaaaatctttgttctagaaactgtatcgatttctacatatacgctgataaatataataacaagaaaatagaatcagcgtcgtttaacacaatattacgaaatattttgagactcattaacgatgaaaactttaaatacttgacagaggaatcaatgataaaaattttaagcgatgatatgttaaatataaaaaatgaggatttcgcaccactaattctcattaaatggttagagagtacacaacaaccatgcaccgtcgagttacttagatgcctcagaatatcattgctttccccacaagttataaaatcactttatagtcatcgactggttagttcaatctacgaatgtataacattcttaaacaatatagcattcttggatgaatcatttcctagataccatagcatcgagttgatatctatcggtataagtaattcgcatgataagatttccataaactgctacaatcgtaaaaaaaatacatgggagatgatatcttcacgtagatataggtgtagtttcgcagtggccgtcctggataatattatctatatgatgggtggatatgatcagtccccgtatagaagttcaaaggttatagcgtacaatacatgtacaaattcttggatatatgatataccagagctaaaatatcctcgttctaattgcggaggagttgccgatgacgaatacatttattgtataggcggcatacgcgatcaggattcatcgttgatatctagtattgatagatggaagccatcaaaaccatattggcagacgtatgctaaaatgcgcgaaccaaaatgtgatatgggggttgcgatgttaaacggattaatatatgtcataggtggaatcgttaaaggtgacacatgtaccgacgcactagagagtttatcagaagatggatggatgaagcatcaacgtcttccaataaaaatgtccaatatgtcgacgattgttcatgctggtaagatttatatatctggaggttataacaatagtagtgccgttaatggaccatcgaatctagtccttagctataatccgatatatgatgaatggaccaaattatcatcattaaatattcctagaattaatcccgctctatggtcagcgcataataaattatatgtaggcggaggaatatctaatgatcaaactactacatctgaaacatatgataaagaaaaagattgttggacattggataatggtcacgtgttaccacgcaattatataatgtataaatgcgaacctattaaacataaatatccattggaaaaaatacagtacacgaatgattttctaaagtgtttggagagttttatagatagttgatagaccaaaatacataattttgtaaaaataaatcactttttatacactaatatgacacgattgccaatacttctgttactaatatcattagtatacgctacacatacatctaaaaaaataggtgatgatgcaactctatcatgtagtcgaaataatacaagtgactacgttgttatgagtgcttggtataaggagcccaattccattattctcttggctgctaaaagtgacgtcttgtattttgataagtataccaaggataaaatatcttacgactctccatacgatgatctagttacaactatcacaattaaatcattgacttctgaagatgccggtacttatgtatgtgcattctttatgacaaatgacaccactgataaagtagaatatgaagaatactctacagagttgattgtaaatacagatagtgaatcgactatagacataatactatctggatctacaccggaaactatttctgagaaacctgattatatagataattctaattgctcgtctgtattcgaaatcgcgactccggaaccaattactgataatgaagaagatcatactgtcacatatactagtgaaaatattaatacagtaagtacaacagacgagactacggaaccaattactgataatgaagaagacgctgtctcatacactacagtaagtacatcatctggaattgtcactactaaatcaaccaccgatgatgcggatctttatgatacgtacaatgataatgaatcatctactgtgtcaccaacaactgtagaaaacatcacgaaatctataggtaagtatagtactaaagactatgtcgaagtatttggtattgcagcattaattatattgtcggccgtggcagttttctgtatcacatattatatatgtaataaacgttcacgtaaatacaaaacagaaaacaaagtctagattttgacttacataaatgtctgggatagtaaaatctatcatattgagcggaccatctggttcaggaaagacagctatagtcaaaagactgttaaaagactatggaaatatatttggatttgtggtgtcccataccactagatttcctcgtcctatggaacgagaaggtgttgattaccattacgttaacagagaggccatctggaagggaatagccgctggaaactttctagaacatactgagtttttaggaaatatttacggaacttctaaaacagctgtgaatacagcggctattaataatcgtatgtgtgtgatggatctaaacatcgatggcgttagaagtcttaaaaatacttacctaatgccttactcggtgtatataagacctacctctcttaaaatggttgagaccaagcttcgtcgtagaaacactgaagcggacgatgagattcatcgtcgtgtgatgttggcaaaaactgacatggatgaggccaatgaagcaggtctattcgacactattattattgaagatgatgtgaatttagcatatagtaagttaattcagatactacaggaccgtattagaatgtattttaacactaattagagacttaaaacttgataattaataatataacttgtttttatatgtggctatttcaacgtctaatgtattagttaaatattaaaaacttaccacgtaaaacttaaaatttaaaatggtatttcattgacgatagatcacacattatgaactttcaaggacttgtcttaactgacaattgtaaaaatcaatgggtcgttggaccattaataggaaaaggtggatttggtagtatttatactactaatgacaataattatgtagttaaaatagagcccaaagctaacggatcattatttactgaacaggcattttatactagagtacttaaaccatccgttatcgaagaatggaaaaaaactcgccatataaagcacgtaggagttataacgtgcaaggcatttggtctatacaaatccattaatgtggaatatcgattcttggtaattaatagattgggtgcggatctagatgcggtgatcagagccaataataatagactaccgaaaagatcggtaatgttagtaggaatagaaatcttaaataccatacaatttatgcacgagcaaggatattctcacggagacattaaagcgagcaatatagtcttggatcaaatggataagaataaattatatctagtggattacggattggtttctaaattcatgtctaacggcgaacatgttccatttataagaaatccaaatagaatggataacggtactctagaatttacacctatagattcgcataaaggatacgttgtatcgagacgtggagatctagaaacacttggatattgtatgattagatggttgggaggtatcttgccatggactaagatatctgaaacaaagaattgtgcattggtaagtgccacaaaacagaaatatgtgaacaatactgcgactttgttaatgaccagtttgcaatatgcacctagagaattgctgcaatatattaccatggtaaactctttgacatattttgaggaacccaattacgacgagtttcggcgcgtattaatgaatggagttatgtaaaatttttgttgataaaaaattaaaaataacttagttattatcactctcgtgtgtacaaccgaaaacatggcgatgttttacgcacatgctttcggtgggtacgatgagaaccttcatgcatttcctggaatatcatcgacggttgccaatgatgtcaggaaatattctgttgtgtcagtttataataacaagtatgacattgtaaaagacaaatatatgtggtgttacagttatgtgaacaagagatatattggagcattgctgcctatgtttgagtgcaatgaatatctacaaattggagatccaatccatgatctagaaggaaatcaaatctctattgtcacatatcgccacaaaaactactatgctctaagtggaatcgggtacgagagtctagacttgtgcttggaaggagtagggattcaccatcacacacttgaagcaggaaacgctgtatatggaaaagttcaacatgattattctactatcaaagagaaggccaaagaaatgaattcactcagtccaggacctatcatcgattaccacgtctggataggagattgtgtctgtcaagttactgctgtagacgtacatggaaaggaaattatgagaatgagattcaaaaagggtgcagtgcttccgatcccaaatctggtaaaagttaaacttggggaggagaatgatacagtaaatctttccacttccatatcagctctcctgaattccggtggcggcaccatcgaggtaacatctaaggaagaacgtgtggattatgtactcatgaaacgtttggaatctatacgtcatctgtggtctgtagtgtatgatcattttgatgttgtgaatggcaaagaacgctgttatgtgcatatgcattcatctaatcaaagtcctatgctgagtactgtaaaaacaaatttgtacatgaagactatgggagcatgtcttcaaatggactacatggaagctctagagtatcttagtgaactgaaggaatcaggtgggcggagtcccagaccagaattgcccgaattcgaatacccagatggagtggaagacgccggatcaattgagagattggcagaagagttcttcagtagatcagaacttcaggcggatgaaccagtgaatttctgtaactccattaatgttaaacatacatctgtttcagctaagcaactaagaacacgtatacggcagcagcttccttctatactctcatcttttgccaacacggatggtggatatttgttcattggagttgataataatacacacaaagtagttggattcacggtgggtcaagactacctcaaactggtagagagtgatatagaaaagtatatcaaaagacttcgtgttgtgcatttctgtgagaagaaagaggacatcaagtacgcgtgtcgattcatcaaggtgtataaacctggggaggagactacctcgacatacgtgtgcgctatcaaagtggaaagatgctgctgtgccgtgtttgcagattggccagaatcatggtacatggatactagtggtagtatgaagaagtattctccagatgaatgggtgtcacatataaaattttaattagggttaactatagacaatgactaaacaattagggtaaggtaactatatacaataactaacaatttgtgtatcatatagacaattaatcagtaactgttatctctttttaactaactaactctatataccacctattaatacatcatagttatagttcttaacatctattaatcatttattcgcttattgctttaattgtttttgtaaactaacattgttaattgaaaagagataacatgttacagaatataaattatatatggatttttttaaaaaggaaatacttgactggagtatatatttatctcttcattacataacacgtctgtgttctaattcttccacatctcatataatacaggaatataatcttgttcgaaaatacgagaaagtggataaaacaatagttgattttttatctaggtggccaaatttatttcatattttagaatatggggaaaatattctacatatttattctatagatgctgctaatacgaatattatgattttttttctagatagagtattaaatattaataagaacggatcatttatacataatctcgggttatcatcatccattaatataaaagaatatgtatatcaattagttaataatgcttatctagataataggataagactaatgcttgaaaatggacgtagaacaagacattttttgtcctatatattagatacagttaatacctatatatgtattttaataaatcatggattttacatagatgccgaagacagttatggttgtacattattacatagatgtatatatcactataagaaatcagaatcagaatcatacaatgaattaattaagatgttgttaaataatggatcagatgtagataaaaaagatacgtacggaaacacaccgtttatcctattatgtaaacacgatatcgacaacgtggaattgtttgagatatgtttagagaatgctaatatagactctgtagactttaatggatatacacctcttcattatgtatcatgccgcaataaatatgattttgtaaagtctttaatttctaaaggagcaaatgttaatgcgcgtaataaattcggaactactccattttattgtggaattatacacggtatctcgcttataaaactatatttagaattagacacagcgttagaaatagataatgaacatatagttcgtcatttaataatttttgacgccgttgaatctttagattatctattatccaaaggagttattgatattaactatcgtactatatacaacgaaacatctatttatgacgcggtcagttatgatgcgtataatacgttagtctatctattaaacagaaatggtgattttgagacgattacgactagtggatgtacatgtatttcagaagcagtcgcgaacaacaacaaaataataatggaattactattgtctaaacgaccatctttgaaaattatgataccgtctatgatagcaattactaaacataaacaacataatacagatttattaaaaatgtgtatagaatatactgcatgtatgaccgattatgatactcttatagatgtacagtcgctacagcaatataaatggtatattttaaaatgtttcgatgaaatagatatcatgaagagatgttatataacaaataaaactgtattccaattagttttttgtaccaaagacattaatactttaatgagatacggtagacatccttctttcgtgaaatgcactagtcttgacgtatacggacgtcgtgtacgcagtattatagcatctattagatatcgtcaaagattaattagtctattatcaaagaagttggatgctggagataaatggtcgtgttttcctaacgaaataaaatataaaatattggaaaactttaacgataacgaactgtccacatatctaaaaatcttataaacactattaaaatataaaatctaagtaggataaaatcacactacaacattgtttccttttagtgatcgacagtgtatactatttttaacactcataaataaaaatgaaaacgatttccgttgttacgttgttatgcgtactacctgctgttgtttattcaacatgtactgtacccactatgaataacgctaaattaacgtctaccgaaacatcgtttaatgataaacagaaagttacatttacatgtgattcgggatattattctttggatccaaatgctgtctgtgaaacagataaatggacatacgaaaatccatgcaagaaaatgtgcacagtttctgattatgtctctgaactatatgataaaccgctatacgaagtgaattccaccataacactaacttgcaaagacgaaacaaaatattttcgttgcgaagaaaaaaatggaaatacttcttggaatgatactgttacgtgtcctaatgcggaatgccaacctcttcgattagaacacggatcgtgtcaaccagttaaagaaaaatactcatttggggaacatataactatcaactgtgatcttggatatgaagttattggtgcttcgtacataagttgtacggctaattcttggaatgttattccatcatgtcaacaaaaatgtgatataccgtctctatctaacggattaatttccggatctacattttctatcggtggcgttatacatcttagttgtaaaagtggttttagactaacgggatcttcatcatccacatgtatcgatggtaaatggaatcccgtactcccaacatgtgtacgaactaaagaagaatttgatccagtggatgatggtcccgatgatgagacagatctgagcaagctctcaaaagacgttgtgcaatatgaacaagaaatagaatcgttagaagcaacttatcatataatcatagtggcgttgacaattattggagttatatttttaatctccgttatagtattagtttgttcctgcaacaaaaataatgaccaatataagttccataaattgctgccgtgaatataaatccattaaaataatgaataatgaataatgaataatgaataatgaacaagtttatcaaaaagattaaagaattgtagctagaatcaattgagatgtcttcttcagtggatgttgatatctacgatgctgtcagagtatttttactcaggcactattatgacaagagatttattgtgtatggaagaagtaacgccatattacataatatatacaggctatttacaagatgcgccgttataccgttcgatgatatagtacgtactatgccaaatgaatcacgtgttcaacaatgggtgatagatacacttaatgatataatgatgaatgaacgcaatgttgctgtatgtgtaggtaccggactacggttcatggaaatgtttttcgattataataaaaataattccaattccaaaaatagcatcaacaatcaactaatgtatgacataattaatagcgtatccataattctagctaatgagagatatagaagcgcgtttaacgacaatggaatatacatccgtagaactatgatggataagttgtacgaatacgcatctctaactactattggcatgatcactggaggtatatgttattatctgttgatgcatctagttagtgtgtataaataattatttcaatatactagttaaaattttaagatttttaaatgtataaaaaactaataacgtttttatttgtaataggtgcaatagcatcctattcgaataatgagtacactccgtttaataaactgagtgtaaaactgtatatagatggagtagataatatagaaaattcatatactgataataatgaattagtgttaaattttaaagagtacacagtttctattattacagagtcatgcgacatcggatttgattccatagatatagatgttatagacgactataaaattcttgatatgtataccattggctcgtctactattcaacgcagaggacacacatgtagaatatctaccaaattatcatgccattatgataaacacccttatattcacaaatatgagggtgatgagcgacaatattctattactgcagagggaaaatgctataaaggaataaaatatgaaataagtatgatgaacgatgatattctattgagacaacatactcttaaaattggatctactaatatattcgatcgccatgaacatagtaatatatattatccaaaatatgatctttaaaaatttaaaatatattatcacttcaacgacaatagtcaaataacagccaacatgagatctgtaattctaacagttttgctaattaatagcataaatgctacaataactagttataagtttgaatccgtcaattttgattccaaaattgaatggactggagatggtctatacaatatatcccttaaaaattatgggatcaagacgtggcagcatatgtatacaaatgtaccagaaggaacatacgacgtatccggatttccaaagaatgatttcgtatctttctgggttaaattcgaacaaggcgactataaagtggaagagtattgtacaggactatgtgtcgaagtaaaaattggaccaccgactgtaacattgactgaatacgaagaccatatcaatttgtacatcgagcatccgtatgccactagaggtagcaagaagattcctatttacaaacgcaatgacatgtgtgatatctacttgttgtatactgctaacttcacattcggagattctgaagaaccagtaacgtatgatattgatgactacgattgcacatctacaggttgcagcatagactttgccacaacagaaaaagtgtgtgtgacggcacagggagccacagaagggtttctagaaaaaattactccatggagttcggaagtatgtctgacacctaaaaagaatgtatatacatgcgcaattagatccaaagaagatgttcccaatttcaaggacaaaatggccagagttatcaagagaaaatttaataaacagtctcaatcttatttgactaaatttctcgatagcacatcgaatgacgtcatgaccgtgcttagcatgcttgactaatttttatcaataatacaaaaaaatgaaataaaaccgtctattatacgctggttaccgctattagctctaaccattttcaggatgaggtccctggttatagttctgctgttcccctctatcatttactccatggtcattagacgatgtgagaagatggaagaggaaacgtggaaattgaaaataggaatgtgtatacaggctaaagatttctattccaaaagaactgactgcagtgtccatcgtccagatgtaggtggaggattgataacagaaggcaatggatacagagtagtcgttcatgatcaatgtgaagagcccaatccatttattattgctaccacaaaacaaacccattttggtgtcacccattcatacattgaattcagcaatagtaacaccggtgcaccagagaatatcccagattgtagtaaacatattttgatttctgtatattgtgatcaagaggcaagtggactagatttccacacattgaaatatgtagaatcaaattatttgcatattacagttaagtatgatacatcatgtattaatcatctgggtgtgaattatagtttcatgaatgaatgtgaacggaaactcacgagtatatatgaaactgatactctaacctgtggagcaaaggatatacaaactagagacaaatatcttaagacttgcaccaacacaaaatttgaccggagtgtctacaagacgcacatgcagaaaagtaagatactccatgttaaaacagaattgtaattggctaatcaatcaggaagtaaatatttttataatattaatccactatcactaatcatcaagcaatttttataaatatgatcatatccacataatcttaaaaaaatgatatgatagttcttacaattagagattgaattctagaatggattctattacaattaccgtcggtaacttaaccattcgttctaatctacagacattggttaataaatcatcttattttgccgatatattaaaatgtggaaactctactaataatattacattgtgcgactttcaagaggatgcgatatatagagttatgcagtttattaacaatgatataatcgagatagaaagtacaaaagatgtagaatccatgatatggcacgctaaacagttgggtgtggaatcattgctaaaagaatgtcaaaattatttgcttaaaatattacgcatatataattgtttagaaatttatagaataactaatattaatgcattatcgtatatctacaacaatgtaagaaacttcatattggataatatactattaatatataaggatccagattttatatatttgcctaaatatattattatcgatttactatctgacgaccacttaaacgtttttaacgaagataatgtggtaaagattatatacacttatatatcttccgatatctacaaggatatttcagatatactaccggttatcagatggaattatctctcacctgaatggttaaccgatatggaatggaaattgggaaacgtagacaaaactatcgttcacaaaaagagatgttattgcggcatcgtaactgttaattataatagggataaaggattaatgattatttctaaacatggttcggaacttgaaacagaattctcgttctctattaaaacagatatcgttgataaattcgaaacagtatatcttaataaaaaaatatatatcattggaggcgttaaacagaagggagaatcaaccaatcaagtcttgagcgtcgatctatcgacaaaaagattaaccatagagccatctcttaacgataaaagaataggagctgctgcaaccgtcgtaaatggacgcatttatgttatcggtggacgagatggatcaaattatctaaacactgtagaaagttggaaacctatggataacaagtggcgatacgaaacaccgataaattataaaagaagcagtgcttccgctgtttcagttaataatactattttcgtaactggcggactattcataaatgactctaatagtatgatcgtgattaacaatatggaaaaacttgacatttataaagacaaacaatggtcgattatagaaatgcctatagctagggtatatcacggtatcgactccacattcggaatgttgtatttggccggaggtctatcagttaccaaacaatatggtaaattagagaaaagcaacgagatatcttgttacaatcctcgaacaaataagtggtttgatatttcatataatatttataagagatccatatcatcattgtgtaaactaaataacgtcttctatgtatttagtaaggacatcggatatgtggaaaagtatgatggtgcatggaagttagtacatgatcatctccccgctataaaggcattttcaacttctccttattgattgaaaatgaaaatataaaatagtttttatgtatagcggtatctcgccctatagttttattgattactactaaacatggatacagacacagacgaatacacggatacggatacggatacggatacggattcagatacaaatactgcaaatgtagaagatatcatgaatgaaatagatagagagaaagaagaaatactaaaaaatgtagaaatggaaaataataaaaacattaaaaagaatcatcctagtgaatatattagagaggcactcgttattaataccagtagtgatagtgattccattgataaagaagttatagaatgtattagtcagaatgtaggaatatagatcacacctaattttttataatcgatacaaaacataaaaacaactcgttattacatagcaagcatggaatccttcaagtattgttttgataacgatggcaagaaatggattatcggaaacactttatattctggtaattcaatactctataaggtcagaaaaaatttcactagttcgttctacaattacgtaatgaagatagatcacaaatcacacaagccattgttgtctgaaatacgattctatatatctgtattggatcctttggctatcgacaactggacaagtgaacgtggtataaagtatttggctattccagatctgtatggaattggagaaaccgacgactataggttctttgttttaaagaatctgggaagagtattcaccccaaaggatacggaatcagtcttcgatgcatgcgtcaccatgataaacacgttagagtttatacactctagaggatttacccatggaaaaatagaaccgaggaatatactgattagaaataaacgtctttcactaattgactattctaaaactaacaaactctacaagagtggagatggggattcacatatagattacaacgaggacatgataacttcaggaaatatcgattatatgtgtgtagacaatcatcttggagccacagtttcaagacgaggagatttagaaatgttgggatattgcatgatagaatggttcggtggcaaacttccatggaagaacgaaagtagtataaaagtaataaaacaaaaaaaagaatataaaaaatttatagccactttctttgaggactgttttcctgaaggaaatgaacctctggaattagttagatatatagaattagtatacacgctagattattctcaaactcctaattatgacagactacgtagactgtttatacaagattgaaaatatatttctttttattgagtggtggtagttacggatatctaatattaatattagactatctctatcgtcacacaacaaaatcgattgccatggatatcttcagggaaatcgcatcttctatgaaaggagagaatgtattcatttctccaccgtcaatctcgtcagtattgacaatactgtattatggagctaatggatccactgctgaacagctatcaaaatatgtagaaaaggaggcggacaagaataaggatgatatctcattcaagtccatgaataaagtatatgggcgatattctgcagtgtttaaagattcctttttgagaaaaattggagataatttccaaactgttgacttcactgattgtcgcactgtagatgcgatcaacaagtgtgttgatatcttcactgaggggaaaattaatccactattggatgaaccattgtctccagatacctgtctcctagcaattagtgccgtatactttaaagcaaaatggttgatgccatttgaaaaggaatttaccagtgattatcccttttacgtatctccaacggaaatggtagatgtaagtatgatgtctatgtacggcgaggcatttaatcacgcatctgtaaaagaatcattcggcaacttttcaatcatagaactgccatatgttggagatactagtatggtggtaattcttccagacaatattgatggactagaatccatagaacaaaatctaacagatacaaattttaagaaatggtgtgactctatggatgctatgtttatcgatgtgcacattcccaagtttaaggtaacaggctcgtataatctggtggatgcgctagtaaagttgggactgacagaggtgttcggttcaactggagattatagcaatatgtgtaattcagatgtgagtgtcgacgctatgatccacaaaacgtatatagatgtcaatgaagagtatacagaagcagctgcagcaacttgtgcgctggtggcagactgtgcatcaacagttacaaatgagttctgtgcagatcatccgttcatctatgtgattaggcatgtcgatggcaaaattcttttcgttggtagatattgctctccaacaactaattaaatcacattcttaatattagaatattagaatattatatagttaagatttttactaattggttaaccatttttttaaaaaaatagaaaaaaaacatgttatattagcgagggtcgttattcttccaattgcaattggtaagatgacggccaactttagtacccacgtcttttcaccacagcactgtggatgtgacagactgaccagtattgatgacgtcagacaatgtttgactgaatatatttattggtcgtcctatgcattccgcaaccggcaatgcgctggacaattgtatgccacactcctctcttttagagatgatgcggaatcagtgttcatcgacgttcgcgagatggtaaaaaatatgccgtgggatgatgtcaaggattgtgtagaaatcatccgttgttatatatcggatgagcaaaaaaccatcagagagatttcggccatcatcggactttgtgcatacgctgctacttactggggaggtgaagaccatcccactagtaacagtctgaacgcattgtttgtgatgcttgagatgctcaattacgtggattataacatcatattccggcgtatgaattgatgagttgttcagcttgacatttcttctttcctccctcttatccctttcccagaaacaaacttttttacccactataaaataaaatgagtataccacctgttatatttcttcctatatttttttattcttccttcgttcaggcttttaacgcgcctgaatgtatcgacaaagggcaatattttgcatcattcatggagttagaaaacgagccagtaatcttaccatgtcctcaaataaatacgatatcatctggatataatatattagatattttatgggaaaaacgaggagcggataatgatagaattataccgatagataatggtagtaatatgctaattctgaacccgacacaatcagactctggtatttatatatgcattaccaagaacgagacctactgtgatatgatgtcgttaaatttgacaattgtgtctgtctcagaatcaaatatagatcttatatcgtatacgcaaatagtaaatgagagaactactggtgaaatggtgtgtcccaatattaatgcatttattgctagtaacgtaaacgcagatattatatggagcggacatcgacgccttagaaataagagacttagacaacggactcctggaattatcaccatagaagatgttagaaaaaacgatgctggttattacacgtgtgttttaaaatatacatacggagataagacatatgacgtaaccagaattgtaaaattagaggtacgggatagaatgatacctcctactatgcaattaccagacggtgttgtaacttcaataggtagtaatttgactattgcatgtagagtatcgttgagacctcccacaacggatgccgatgtcttttggataagtaatggtatgtattacgaagaagacgacgaggacggagacggtagaataagtgtagcaaataaaatctatactaccgataagagacgcgttattacatctcggttaaagattaatcctgtcaaggaagaagatgctacaacgtttacgtgtatggcgtttactattcctagcatcagcaaaacagttactattagtataacgtgattgtatgttgttacattttccacgtcattagagtttataaaaattttttatacgttatcttccaacaagcaattgacgaacgtattgctatgattaactcccacgatactatgcatattattaatcattaacttgcagactatacctagcgctattttgacatactcgtgttctcgtgtaattgccgtatctatattattaaagtacgtaaatctagctatagttttattatttaattttagataatataccatctccttatttttaaaaattgttacatcctttattaaatcattaatgggaatttctatgtcatagttaatatattgtgaacaacaagagcagatatctataggaaagggtggaatgcgatacattgatctatgtagttttaaaatacacgcgaactttgaagaatttatataaatcattccatcgatacatccttctatgttgagatgtatatatccaggaattcttttattaatatcgggaaatgtataaactaaaacattgcccgaaagcggtgcctctatcggcgttatatccgttcttaacttacaaaatgtaaccaatacctttgcatgacttgttttgttcggcaacgttagtttaaacttgacgaatggattaattacaatagcgtgatccgcgcatctattaagtttttttactttaacgcccttgtatgtttttacagagactttatctaaatttctagtacttgtatgtgttataaatataacgggatatagaactgaatcacctaccttagatacccaattacattttatcagatccagataataaacaaattttgtcgccctaactaattctatattgttatatattttacaattggttatgatatcatgtaataacttagaatctaacgcgcatcgtcgtacgtttacacaattgtgatttagtgtagtatatctacacatgtatttttccgcgctatagtattctggactagtgataaaactatcgttatatctgtcttcgatgaactcatcgagatattgctctctgtcatattcatacacctgcataaactttctagacatcttacaatccgtgttattttaggatcatatttacatatttactggtatatcaaagatgttagattagttaatgggaattgtctataataatgaatattaaaacactagtatagcaggagtttatactcacaaaacatcataaaaatgagtcgtcgtctgatttatgttttaaatatcaaccgcaaatcaactcataaaatacaagagaatgaaatatatacatattttagttattgtgatatagattataagtctacagaactcgagtttgtagttaaaaactatgatctaaacagacgacagcctgtaactggatataccgcactacattgctatttgtacaataattactttactaacaacgttctgaaggtattattaaatcatggagtagatgtaacgatgaaaaccagtagcggacacatgcctatttatatattgcttactagatgttgtaatatttcatacgatatagtgatagatattatagacaaagataaaaaccacttatcgcatagagactattccaacctactactagagtatataaaatctcgatacatgttattgaaggaagagaccatcgatgagaaaatagtatcaactttattggataagggaatcgatcctaactttaaacaagacggatataccgcgttacattattattatttgtgcctcgcacacgtttataaaccaggtgaatgtagaaaactaatcccgataaaaaaggctcggaaaattatttcgttgtttatacaacacggagctaacataaacgagttagataattgcggcaatacaccattccatttgtatcttgcggttgaaacgtgtaataatatccatatgactaaaatgctattgacttttaatccaaaattcgaaatacgtaataatcatgggttgacgcctatactatgttatataacttccgactacatacaacacgatattcttgtcatgttgatacatcactatgaaacaaatgttggagaaattccgatagatgagcgtcgtatgatcgtattcgaatttatcaaaacatattctacacatccggcagattcgataacttatttgatgaataggtttaaaaatatagatatttatacccgttatgaaggaaagacgttattacacgtagcgtgtgaatacaataatacacacgtaatagattatcttatacgtatcaacggagatataaacgcgttaaccgacaataacaaacacgctacccaactcattatagacaataaagaaaattccccgtatactatcgattgtttattgtatatacttagatatattgtagataagaatgttataagatcgttggtggatcaacttccatctctacccatcttcaatataaaatcatttaagaaattcatatcctactgtatacttttagatgacacattttacgatagacacgttcagaatcgcgattctaaaacgtatcgatacgcattttcaaaatacatgtcgttcgatgaatacgatggtataataactagatgtcataaagaaacaatattgctcaaactatccactgttctagatactacgctatattctgttttaagatgtcgtaattcgagaaagttaagaagatacctcaatgagttaaaaaaatataataacgataagtccttcaaaatatattctaatattatgaatgagagataccttaatgtatattataaagatatgtacgtatcaaaggtatatgataaactatttcctgttttcacagataaaaattgtctactaacattactcccttcagaaattatatacgaaatattatacatgttgacaacttacgatcttcataatatatcatatccacctaccaaagtatagttgtatttttatcacgcgatgtatataaaactgatattatataattatcttagtgccggtatgtcgaagataactatgaaaatgatggtccgtatatattttgtgtcattattgctattccatagttacgccatagacatcgaaaatgaaatcacagaattcttcaataaaatgagagatactctaccagctaaagactctaaatggttgaatccagcatgtatgtttggaggcacaatgaatgatatggccgctctaggagagccattcagtgcaaagtgtcctcctattgaagacagtcttttatctcatagatataaagactatgtggttaaatgggaaaggctagaaaagaatagacgacaacagatttctaatagacgtgttaaacatggtgatttatggatagccaactatacatctaaattcagtaaccgtaggtatttgtgtaccgtaaccacaaagaatggtgactgtgttcagggtatagttagatctcatgtgcggaaaccttcttcatgcattccaacaacatatgaactaggtactcatgataagtatggtatagagttatattgtggaattctttacgcgaactattataataatataacttggtataaagataataaggaaattaatatcgatggtattaagtattcacaaacgggaaaggaattaattattcataatccagagttagaagatagtggaagatacgactgttacgttcattacgacgacgttagaatcaagaatgatatcgtagtatcaagatgtaaaatacttacggttataccgtcacaggaccacaggtttaaactaatactagatccgaaaatcaacgtaacgataggagaacctgccaatataacatgcactgctgtgtcaacgtcattattggtcagcgatgtaatggttgaatgggaaaatccatccggatggcttataggattcgattttgatgtatactctgttttaactagtagaggcggtatcactgaggcgaccttgtattttgaaaatgttactgaagaatatataggtaatacatataaatgtagtggacacaactattattttgataaaactcttacaactacagtagtattggcgtaaacaatatttttttattatattactgaattattattactaacttacgcatccatctacaataatggacgaagataagatacgactatctaagtatttgtatttcacggatagagaacgtataaatgtaaacactgttaaacagttgtgtaaaatatcagatcctaatgcatgttatagatgcggatgcactgcgttacatgagtacttttataattatagatcagtcaacggaaaatacaagtatagatacaacggttactatcaatattattcatctagcgattatgaaaattataatgaatattattatgattatgatagaactggtatgaacagcgagagcgagaatgagaatgagagtgagagtgataatatatcaatcaaaacagaatatgagaatgaatatgaattctatgatgaaacacaagataaaagtacacaactagtaggttacgacattaaactcaaaaccaatgaggacgattttgtggatgaattctatggctatgatagatcagtgggtgttcatgattatatagatgaatcaattaataaagtagtatatggaagagagtctcacgtaagatggcgggatatatggcaagaacataatgatggcgtatacagtataggaaaggaatgcatagataatatatacgaagatagacataccgtagacgaattttataggatagatagtttaacagaagttgatgacacagaccacacatttccgataaagaaagatgcttctacacaaacatgggaaaagaaatcagagttagatagatacatggaatcgtatcctcgtcatagatatagtaaacattctgtatttaagggattttctgataaagttagaaaaaatgatttagacatgaatgtggtaaaagaattactttccaatggcgcatctctaacaatcaaggatagaagtaataaggatccaattgctgtttattttagaagaacgataatgaatttagaaatgattgatattattaacaaacatacaactattgatgaacgaaagtatatagtacactcctatctaaaaaattatagaaatttcgattatccatttttcaggaagttagttctgactaataaacattgcctcaacaattattataatataagcgacagcaaatatggaacaccgctacacatattggcgtctaataaaaaattaataactcctaattacatgaagttattagtgtataacggaaatgatataaacgcacgaggtgaagatacacaaatgctaactccattgcataaatatttgtgtaactttgtatatcataatattgaatgcggtgtccgatactacaatgaaaagattatagacgcatttatagagttaggagccgatctaactattccaaataacgatggactgataccagtaatttactgtatacacgtaaatgctgaatatggttataacaatattactaacataaagataatacgtaaactacttaatcttagtagacatgctccacataatctatttagagatcgagtcatgcacgattatataagtaatacatatattgattctgagtgtttagatattattagatcgttggatggattcgatatcaatggttactttgaaggacgtacacctcttcattgtgctatacaacataacttcactcagattgctgagtacttattagatcgaggagctgatatatcattaaagacatgcgatggaaaatctgtattcgatttatcgttatgtagttacatccctcttaaatggactagctttttgattggtcgtctaccacctaaaagtgtcatatgctcactgactaaccatataatagattatgttcttacgaacaatagacgtattatttggcagagtcaaatgattaataagtacgtactgttactggacccatccttttattctagattcagaaatgctatcgaaagcaaattaaaccaacacgctaatcgttataataggttcgaacacgatagggatcgcgttaatgaaaattatgacaaagtcttacatgacatagacatatatatcaaggatgtacaaatattaaaatctatttccatcactaataatataacactatacgatactattataaataagtcagagtttcctgtacatcgtacaaatgacaaacaattaattaatctcataaaatccaatacatatcataatcttatcgaaaaagttattaaaaatacattagagaaatatactttaactaatatagtcctcgagtatatgattaaatatcaatctcaatcatcttatttaagtcgtattcctaacgaaatattattcaaaatattatataaactcgacgtatctgatttacgtaaactatatacaagatatatgcaagagaatgagaatgagaatgatatcgtattagattatcatatagagaatacgaggtctgtttctacacagacatgaataatgaatacgcactacaacgtttttttaaaaatcttatataacactaattacatcaagattataatattgaaatcgtaatttgagttgtctgatcatcatggatatcgaaaatgatatacgtaataggcgaatcatacgtaacattagcaatcttttagacgatgatatattatgcgatgtaatcataactatcagagatggagaagaaattaaagcacataaaactatcttggctgccggatctacgtattttaaaacaatgttcacgacacctatgatagcgagagatctagtaactagagtaaatctacagatgttcgataaggatgccgttaaaaatattgtacagtacttatacaatagacatataagttctatgaatgtaatagacgtactaaaatgcgccgactatcttctaatcgatgatctagtcgctgactgtgaatcctatattaaagattatacgaatcatgatacctgcatatgtatgtaccataagttatatgagatgattcatattccaatagtcaaatatattaaacgtatgctgatgagtaatataccaacattgataactacggacgcatttaaaaaaacagtattcgaaatattattcgatattatttctactaacgacaatgtatatttatacagagaaggctataaagtaacgatactattgaagtggctagaacacaactacatcacagaagaacagcttttgtgtatactgtcctgtatagatatacaaaatctagataagaagtctagactactactctattcgaataaaactataaatatgtatccttcgtgtatacaatttctaatagataataaacagaatagaaacattataccccgccagttatgtttagtgtgtcatgatactaagtataatgtatgtaacccgtgcatattagtatataacattaatactatggaatatagtgttatttccaccattcctaatcacataattaattacgcatccgcgattgtagataatgaaataataatagctggaggatataactttaataatccatcattaaacaaggtatataaaataaacattgagaacaaaatacatgtcgaactcccacccatgataaagaatagatgtcgtttttcattggctgtaatcgatgacacaatttatgctataggtggtcaaaacggaacgaatgtggaacgaactatagaatgttatacaatgggtgatgataagtggaagttgttacccgatatgcccatagcattatctagttatggcatgtgtgtattagatcaatacatatacattataggcggtagtaccctatacattgattatacatcggtacatgcagtaaatagcatagatatggaggaggatacagatacttcaaataaagttataagatacgacactgtcaataatatatgggagacattgcctaacttctggactggaactataaaaccaggcgtggtctcgcatgaagatgatatatatgttgtatgcgacatcaaagatgaaaaaaatgttaagacttgtatatttagatataacacgaatacgtataacggatgggaattggtcacgacgacagaaagcagattatcagctctgcatactattcttcatgacaataccataatgatgttacattgttatgaatcgtatatgttacaagatacatttaatgtgtacactcgcgaatggaatcatacgtgccatcaacattcaaatagttatatcatgcacaatatactacccatctactaaatataatagaataaatgagtatgattattttagataacgattgattttatcgttaccgctgcattcttatattctttgcttacggaacctatatttagaaacgtctactaacgatttttttatgcttgcattattaatggtatgtaatatgattgattgtgtacggaataccaatttgtcaagtatgaatacggaacacaaacataaactgaagtttaacattatttatttatgaatatatattatatatcgtttcggtatcgttattatttggtatataccatggatatctttaaagaactaatcttaaaacacacggatgaaaatgttttgatttctccagtttccattttatctactttatctattctgaatcatggagcagctggttctacggctgaacaactatcaaaatatatagagaataagaatacaccaaaggatgacaaggatgacaataatgacatggacgtagatattccatattgtgcgacactagctaccgcaaataaaatatactgtagcgatagtatcgagttccacgcctccttcctacaaaaaataaaagacgattttcaaactgtaaactttaataatgctaaccaaacaaaggaactaatcaatgaatgggttaagacgatgacaaatggtaaaattaattccttattgactactccactgcccattaatactcgcatgacagttgttagcgccgtccattttaaagcaatgtggaaatatccattttctaaacatcttacatatacagacaagttttatatttctaagaatatagttaccagtgttgatatgatggtgagtactaaaaatgacttacaatatgtacatattaatgaattattcggaggattctctattatcgatattccatacgagggaaactctagtatggtaattatactaccagacgacatagaaggtctatataacatagaaaaacatataactgatgaaaattttaaaaaatggtgtagtaagttatccactaaaagtatagacttgtatatgccaaagtttaaagtggaaatgacagaaccgtataatctggtacctattctagaaaatttaggacttactaatatattcggatattattcagattttagcaagatgtgtaatgaaactatcactgtagaaaaatttctacacaagacgtttatagatgttaatgaggagtatacagaagcatcggctattacaggagtgtttatgactaacttttcgatggtatatcgtacgaaggtctacataaaccatccattcatgtacatgattaaagacaacacaggacgtatactttttatagggaaatactgttatccgcaataaatataaacaaatagacttttatcacgttatctcatgtctaaatattacaaatagtaatagcatacactaaaacttaaaaaataataatatcattattacaattaataagtataaactaaaaaattaaacaatatcgttattatataagtaatatcaaaaatgatgatatacggattaatagcctgtcttatattcgtgacttcatccaccgctagtcccctttacattcccgttattccacccattacggaagataaatcgtttaatagtgtagaggtattagtttccttgtttagagatgagcaaaaagactatactgtaacttcgcagttcaataactacactatcgataccaaagactggactatcaacgtactatccacacctgatggtctggagataccattgaccaatataacttattggtcacggtttccaactataggtcatgcattgttcaaatcagagtccgaggatatcttccaaaagaacatgagtattctaggtgtctctattgaatgtaagaagccatcgacatcatttacttttttgaccgtgcgtaaaatatctcgagtatttaatagatttccagatatggcttactatcgaggagactgtctagaagtcgtttatgtaacaatgacttataaaaatactaaaactggagagactgattacacatacctctctaatgtggggattcctgaatactatcggttgatgagtggtgtcgatggttgattattaattagtttattcacataaaagaatattttttataaacatgaaaccactgtctaaatgtaattatgatcttgatttatagatgaaaatcagctgcttcagatgattttggtcagtatgtaaatatgaaaaaataaatataacttatttttgagattaagtgctatcgtgcttaattattttgttctataaactgaatatatagctacaattattgacgggtttgtttatgaccggcaaccatgaatttacagagattatctctggctatatatcttactgcgacatgttcgtggtgttatgaaacatgtgtaagaaaatctgcattgtatcatgacaatcaattggggcatgcggaagacaatcaagatagtgtagcgtcgctaccgtacaagtatctacaagtagtcaatcaaagagaacgtagtagattgttggctacgtttaattggacaagtatagctgagggtgttagaaatgagttcattaaaatatgtgatatcaacggaacatatctatataattatactattgctgttagtatgactattgattccacggaagaactaccaacagttactccatatacaacatatgaaccttctacatataattatactatagataatggcaccgttgttactactgaagaactaaaagtgactccatcaccaactccatatgcgactgtaacaactcctcttccaacatcatcagttccatatgatcaacgatctaataacaatgtaagtactatatctattcagatactgagtaaaatattgggagtcaatgaaacagaattaactaattatcttattacgcataaaaatgtcacggttgacaataacacaactaataataacatcactgtcaatgatgagacatctgataataacacattgcatggtaatataggatttttggaaataaataattgctacaatatttctgtatcaaatgctagttttagaataacattagtaaacgatacttctgaagaaattgttctaatgctaacagggactagttcatccgacacattcatatcttccaccaatatcactgaatgtttgaaaacattaatcaataatacgtcgaatattagtgatgtaagtataacacaaaatatgaatgtaacatctaattgtgataaatgttcaatgaatttgatgacatccgttattcctgttgttaatgaatttaacaatacgttggaaaaaattggtgtaaaagatgataaaaacaatacagtacataactattataattgtaaactaactacaaattctgcatgtgatgagttaatcaatttagatgaagtcattaacaacataactctgacaaatattataagtagtagtgtttctacaaccaacagcagaaaaagacgagatctgaatggcgagtttgaattttctacatccaaggaattagattgtctttacgaatcatatggtgtaagcgatgatgtaagtcattgtttttcatcacctagacgtagacgatctgacgacaaacaggagtacacagaaatgaaattactcgaccacgcgaaaaaagatctaggcatagacagtgttattcctagaggtacaactcatttccaagtaggtgcatctggagcaagtggtggtgttgtaggcgatagtaacccatttcaaaatgttaaatcacgtgccagtatattggcggaaaaaataatgcctagagtacctactactgctaccgaagagcagctatatgcaaccgtaaatagacaagccaagttgcctgcaggtgttaaaagtactccgtttacagaggcgcttgtgtctacgataaaccaaaagctttctagtgttaaagaggtaacttatgcttcgctcaatctgccaggatcaagtggctatattcatagaccatctgattctgttatttacagcactataagacggacacgtttacctagtgatagcgatagtgattttgaggatatacaaactgttgttaaggaatataatgaaagatatggtagacgagtcagtagaacacagtcatcaagtagtagtgattttgaagatatagatgaggtggttgcagaatataaacaaaaatatggtggagcagctgctagccgtggtagaacatcgtcatcaagtagtagtgattttgaagatatagatgaagttgttagagaatataatcaaaagtatggcaccgccatgacaaaaggacgtggttctcctaaaccggatccgttatatagtactgttaagaaaacacctaaaagtatagcatccggagtagacatagttacaaaacaaacagactattctctattacctggtgtgaatacaggcagttctattgtgacgcctcttaccagaagaggagctactagacgacctaaacgcccatctacacctccacgcgaagatctaccaccgcttcctccgaatcctcctcgtcgacaacttcctcgtggcggtgatcattctccaccacaagttcctcaacgtgattattctccaccacttcctccgcgcggacctccaccacttcctcctaaaccagttccagctattccacctagagatggtcaaccagataataaaggatttagtaagtttgtatcccctagacggtgtagaagatcaacctctggagtcgtatgtggtatgatacaatcaagaccaaacgatgattattcacttcttcaacgaccaaaaattgaaccagaatatgcggaggtcggtaatggcttacccaagaacaatgttcctgtgataggcaataaacatagtaaaaaatatacatcggcgatgtcaaaaatatcaacaagatttgataaatctatggcatttggaacagcaatgttactaactggtcaacaggctattaaccaacaggctagatcaactgcgttgattagaaaagatcaaatgagcaaggacgaaaagatattcgaagcagttacaatgactctatcaactataggttcaacgttgacaactgcaggtatgatagctccaccactaatgattgcaggaataggtataactgctataactggtataatagatacggtaaaagatatatattacctgttttcaggacatgagaagccggtagatcctgttgttaaattatttaatacatacgctggattagtatccgatagtaataaaatgggtgtaagaaaatgtttgacacctggagaagatacaattatttacatggcatatagaaacgataccagttttaaacagaatacggaggcaatggctttgtatttcttagatgttatcgactcagagatcctatatctaaacacatcaaatttagttctagagtatcaactaagggtggcttgtcccataggaacattaagatctgtagatgtggacataactgcttatacaatattatatgatacagcggataatattaagaaatacaagtttgtcagattggcaacgctactatccaaacatccagttattagattgacatgtggtctagcagcaacattggtaattaaaccgtacgaggtacccatcagtgatatgcaactactaaaaatggcgacgcctggtgaaccagaatcaactaaatctataccatctgatgtctgtgataagtatcctctaaagaaattctatcttttggctggtggttgtccctatgacacatctcaaacttttattgtacatactacttgcagtattctactaagaacagccacatgggatcagtttagaaacagatgggtgttacaaaatccatttagacaagaaggggcatataagcaactgtttacctttagcaaatacgattttaacgacaccataatcgatcctaatggtgtggcgggtcatgctagcttttgtaccaatagaagcagcaaccaatgtttctggtccgaacctatgatattggaagacgtgtcatcatgcagttctagaactagaaaaatatacgtaaaactgggaatatttaatgctgaagggtttaatagttttgtactaaactgtccaactgggtctacaccgacatacatcaaagataaaaatgcggacagtaacaatgttatcatagagctacctgtaggtgattacggcactgccaaattgtattcggcaacaaaacagtcaaggatagctgtgttctgcacacataactatgataaacgattcaaatcagatattatagttctaatatttaatagtattagtggtgttccattttcgagcatatacactggaagtgtgaacggtagaaatagactgtttaccacattgtctagaggaatgccatatagatcaatgtattgcgataacagacgaccaggttgttattattcaggaataccatttaatgaaaatagtgtagaatcagatctgcattatggaccagaaataatgcttaaggaaacatatgacgcaaacagtattgatccacgagttataacaaagtcaaagacgcactttcctactccaataagtgtaaaattcatggttgacaatttaggaaatgggtataacaaacccgaaaatttttggaaagatgctaaaaataagaaaaggacatatagcgcaatgacaataaaaatcctaccatgtacagtgagaaataaaaatgtaaactttggatataactatggacatattatttctaatatggtttatgcacaatctactagtcaggattatggagatggtaccaactatacatttaaatctgtaaatagatcagatcatgagtgtaaatctattttagacttgaaggctaaggaagtaactgtgatgtgtcccgcgtttagtataccaagaaatatatcagcgtatgaaggtctatgctttagtgtcactacatctaaagatcattgtgccacagataatgattggttaaaatctcatggttatggaaaggcagatgctattaaacaacgtgcctgttttcatcattggaattatgccacaacgtcgttggattattactgttcgtcagaaaatctttttaaaagcgactggcctgactatgatccatgtaagtcatatattcatatagaatatagagacatatggatagaatctaaagtgttgcagcaacctccttatacattcgaattcactcatgacgattctaatgaatacgtgaataaagaaattagtaacaaattgaatgatctgtacaatgaatacaagaacattatggaatatagcgacggatcattgcctgcttctataaacagattagcaaaagcattgacttcagagggtagagaaatagcaagtgttaatatagatggtaatctgttagatattgcatatcaagcagataaggaaaagatggctgacatacagaacaaaataaatgacatcacaagagatttattcattcacactctatcagacaaagatataaaagacattatagaatccgaagaaggtaagagatgttgtataatagatgttaagaacaatcgtgttgaaaagtactatcctattgataattatctatgtggtactttagatgattatatatacacttctgtagaatataacaaatcctatgtgttagtaaacgatacttatatgagctacgactatcttgaatcatcgggtgtagttgttctatcatgttatgaaatgactataatctccttggatacaaaagacgccaaagatgctatagaagatgagatagtagcaagtgctgtagccgaagcattgaatgacatgtttaaggaatttgataaaaacgtaagtgctattataataaaagaagaagataattatctaaacagttctccgaatatctaccatataatatatatcataggtggcactattctgatactgttagtcattattttaatattggcaatttatatagcgcgcaataaatacagaaccaggaaatataaaataatgaaagatgatactatgagcattaaatctgagcatcataatagtcttgaaacagtatctatggaaattatggataatcggtactaataaaaaaatagtttaactctttttagaaccagtttggtactggaatttcagttcattcgttgagaatattgatgatttttttaagatgatatttactttttatatgcttgcattacagaatgatattcacaggtattattaaaatgagtatcggagttacattaccatatcatcatccatgctcatgtggatggagaatccatccatccatccattatataatcaatgatacgtgtattagaatactttccgaataagtcttctaaatattgtattaattatgaaaaactatgctatgcgattatgatacaaagatgtttaatgatacgatactagattttatctctagcgagatgtcgtcagaatcatttatcataactatgtttaataataattcatcaacgaatatcgataacatgtgtcatttatactttaaatacattgaagtctgtccatcttctctattgtttagactgtttgtagaatgctgtgatataaacaaactagtagaaggtacgactccgttacactgttatctaatgaatgaaagatttgaatcatctgttttaaaaaacctattaaaggagtatggcatgaatacgtttaatgttcgtgacagtgatggccatattccgttacacaaatatctaactcatgataaagttgagaatgatatctttgatatgctttctgatagtatagatagctttagcgaatataaaaatatattaatacactatatatattctaaacttgattcaaaaccgataacctactacgtgctatataagttgttaagaaaaggagcagaccctaattatgcagatgatgaaggtaatacttttcttcattacttctgcatctatatgtccgcttatgagaaaatgtcattgatgcatcgtgaaaagaaatttattaaagagttggtaaaatatggagccgatattaataaagtaaataatataggaaatacgcctctacataactacgtatctcaatatgatcacagtcctagtataatatttactcttttgtcattgggagctgacttgacaatacaaaacaatgatcgtctaactcccataatggaatatataaaatgtgaagatatagaatacaatattcttttaatgttaattaattggtatgaatcaaaatacaaaaaactagaaaaggaagaaggccagcatctcttatatctattcataaggcataatgatagtaatgaccttaatatactatcctatttactaaagaagtttgacatgaaaaacgatgaatactataatgacattacacctctacataatgcttgtatagcgtgcaacattgatataatgtcttatctcgtatatattggatgtaatatcaatctcccaactaaagacaacaagagtatatttgatatcatatcaacacaaccaaataatataatatatagaaattgtatcatctatcatattatcagaaacggactagatatatctttatccgtaatcaaatcattacttagtattattccatatcttccaactgatcactacgtaagatatataataacttattgcatcttaatgaacaacaatttcataaaagaatacaataatcaatgtttaaatcataattacagagaattatttgttaatttcataacattcgattatatagataatatcgtttcagattgcgtcaatgatataaataggcttaaacaagaaaactattataatatattaagatatgaagatataaaatattaccacctagttaatgatatctatgttacaaacaagacttttcccatgtacacggacattatagagaattgtaacttacgcatgagacgtaaatataaactcataaatacggtcattgacaaaatatatagtatctcttcagttgataatcgcgaactctcactattgcctccagaaatcatacgcgagataatatcaaagttaagtgaatacgatttaaatactattttgtatggtcgtaaccatctaaaacattattataaatttaactagatattaatgatgaatatgacaccatcatacatcttgttggtatatatgttcgtagtcgtaagtggagatgttccttatgaacacattaatgggaaatgtaacggtaccgactataatagtaataatctatgttgtaaacaatgcgatcctggaatgtatatgactcattcctgtaataccacttctaatacaaaatgtgacaagtgcccagatggcacctttacatccattcctaatcatattcccacgtgtctaagttgtcgaggcaaatgtagcagtaatcatgtagagactaaatcgtgtagtaacacacaggacagagtatgtgtctgtgcatccggatactactgcgaatttgaaggatcaaacggttgcaggctatgtgtaccacaaacaaagtgtgattctggttacggtgtatatggctactcatctaaaggagatgtaatatgtaaaaagtgtccgggtaatatagataaatgtgatctgtcctttaacagcatagatgtagaaattaatatgtatcctgttaacaagacctcttgtaattcgagtataggaagtagcagtaccatatcaacttccgagttaacaattactctaaaacatgaggattgtactactgtctttattggagattactattcagtcgttgataaactagcaacttcaggtttctttacaaacgataaagtacatcaagacctcacaacgcagtgcaagattaatctagaaatcaaatgtaattctggaggagaatctagacaactaacacccacgacgaaggtatactttatgcctcattcagaaacggtaactgtggtaggagactgtctctctaatctcgatgtctatatagtatatgccaatacggacgcgatatattccgacatggatgtcgtcgcttatcatactagttatatactaaatgttgatcatattccaccaaatgattgtgaaagagattgagattaaatcgtctaacaaacaattagtttttatgacattaacatatataaattaatcattattgacttaacgatgacgaaagttatcatcatcttatgattcttgattattaatacaaattcattgtctatgaaatgtgaacaaggtgtctcatattataattcacaagaattaaagtgttgtaaactatgtaagccaggaacatattcagatcatcgatgtgataaatacagcgataccattttgtggacattgtccgagtgacacattcacgtcaatatataatcgttctccttggtgtcatagttgtagaggtcacaccttgtacacctaccacaaatagaatctgtcattgtgactcgaatagttattgtctccttaaagcttctgatggtaactgtgttacatgtgctccgtcatacgtaaatgccttcttaagctatttggaaaccaaggttgttagttaataatatacaagatatttttttctccctctgatgatccatgtaataaaccaatgactagataagacactctcattcctcattcctcatccacaacaccattaaaaaaatggaaaataaagccctctattagcacagacggctacaggtctaccatcaggttaaccttcgtctaccttcacaatggcctctccttgtccccagttcactccctgtcattgccacgctactaaggactccctgaacaccgtggatgacatcaaacattgtctgactgaatacatcctgtgggtttctcatagatggacccatagagaaactgcagggtctctctacaggcttctcatctcttacagaactgatgcaacggagctctttggtagcgagttgaaggagttctcggattcacttccgtgggacaatatcgacaattgcgtggggatcattaactgtttcatcagaaatgaatcaatgaaaaccgccaaagaacttcgtgcaatcattggactttgtactcaatcagctatcgtctctggaagagtcttcaacgataagtatatcgacatactacttatgctgcgaaagattctgaacgagaacgactatctcaccctcttggatcatatccgtactgctaaatactaaatcttcttgctctctcactaatactctcactcactcatacactcactcatactctcactcactcactcacacactcactcactcactaatactctcactcactacactttttatcacacacacacacacacacaccttactttttatcatcttatgaggaatgattgccttcatcatttttcgtgaaatataatatagtaataattagaactagaatagctatggattgcggcagagattgcactattctatgtcgtctactggatgaagatgtgacgtacaaaaaaataaaactagagattgaaacgtgtcataacttatcaaagcatatagatagacgaggaaacaatgcgctacattgttacgtctccaataaatgcgatacagacattaagattgttcggctgttgctctctcgcggagtcgagagactttgtagaaacaacgaaggattaactccgctaggagtatacagtaaacgtaaatacgtcaaatctcagattgtgcatctactgatatccagctattctaatgcctccaacgaactcacgtcgaatataaatgatttcgatctgtattcgtatatgtcttcggataatatagacttacgtctactaaaatatctaattgtggataaacggatacgtccgtccaagaatacgaactactacatccattgtctcggattggtggatatatacgtaacgacgcctaatccgagaccagaagtattgctatggcttcttaaatcagaatgttacagcaccggttacgtatttcgtagctgtatgtacgatagcgataggtgtaagaactctcttcattactatatattgtctcatagagaatctgaatctctatccaaggatgtaattaaatgtttgatcgataacaatgtttccatccatggcagagacgaaggaggatctttacccatccaatactactggtcttgctcaaccatagatatagagattgtcaaattattaataaaggatgtggacacgtgtagcgtatacgacgacatcagtcagccatatattaggggagtactagcggattatctaaacaagcgatttagagtaaccccatataatgtagacatggaaatcgttaatcttcttattgagggacgtcatactcttatcgacgtaatgcgtagtattacttcgtacgattccagagaatataaccactacatcatcgataacattctaaagagatttagacaacaggatgaatccatcgtacaagctatgttgataaactacttacattacggcgatatggtaagtatacctatcctccgatgcatgttggataacggagcgaccatggataagacgacggacaacaactatcctctacacgattactttgttaataataataatatcgtcgatgtaaacgtcgtaaggtttatcgtggaaaataatggacacatggctattaatcacgtatcgaacaatggacgtctatgcatgtacggtctgatattatcgagatttaataattgcgggtatcactgttatgaaaccatactgatagatgtatttgatatactaagcaagtacatggatgatatagatatgatcgataacgagaataaaactttactatattacgcggtcgatgtcaataatatacaatttgcaaggcggttattggaatatggagcgagcgttaacacaacgtcgcgctcgataatcaatacggccatccagaaaagcagttaccgaagagaaaacaaaacaaagctagttgatttattacttagctaccatcccactctagagactatgattgacgcatttaatagagatatacgctatctatatcctgaaccattattggcctgtatcagatacgccttaatcctagataatgattttccttctaaagtaaagtatgatatcgccggtcgtcataaggaactaaagcgctatagagcagacattaatagaatgaagaatgcctacatatcaggcgtctccatgtttgatatattatttaaacggaacagacgtcacagattgagatacgcaaagaatccgacatttataaactttgtatccaacatcaaatggtacaaaaaagaactaacgtccatcattacagagactgtaaagaacagtgagaggatcgactccatagtggacaacattaatacagacgataacttgatttcgaaattacccatggagatacaacgcgaaatactttattactccattaaataatttatcatggagtgataatgtgtttcatttgtttccatggcatattacaaaatcgattccgtccaagatgataaaaacatttaccggcatcataaacacggagtttattttatatgtcaaccattactaaaaaaatatattgttctggttttctttttctttcgtacatctctaattatgaaaaagtaaatgatgaaatgtatgagatgggcgagatggacgagattgtgcgcatcgttaacgatagtatgtggtacatacctaacgcatttatggacgacggtgagaatgaaggtcacatttctgtcaataatgtctgtcatatgtatctcgcattctttgatgtggatacatcgtctcatctgtttaagttagttattaaacattgcgatctgaataaacgactaaaatgtggtaactctccattacattgctatacgatgaatacacgatttaagccatctgtattaaagatattgttacaccacggcatgcgtaactttgatagcaaggatgaaaaaggacatattcctctacaccactatcttattcattcactatcaatcgataacaagatctttgatatactaacggacaacatcgatgactttagtaaatcatcagatctattgctgtgttatcttagatataaattcaataggagattaaactactacgttctgtacaaattattgactaaaggatccgacacgaattgcgtcgacgaggatggactcacttctcttcattactactgtagacacatatcatttttccacgaaaacaattattacgagacaaagaggtacactaagatgtacgccgagaagcgattcatcaacacgataatagatcatggagcaaacattaacgcggttacgaaaataggaaatacgccgttacacacttaccttcaagagcataccaaacatagtcctcgtgtggtgtatgctcttttatctagaggagccgatacgaggatacgtaataattttgattgtacacccatcatggaatacataaagaacgattgtgtcgcctgtcatattctcatactgttactcaattggcacgaacaaaaatacgggaaattacaaaaggaagaaggacaccatctactttatctattcataaaacataatcaattgcacaaacactctatcgacatactaaggtatctactagataggttcgatattcagaaagacgaatactataataccatgactcctcttcatgccgccttccagaattgtaacaacaaggttgcctcatacctcgtatacatcggatacgacatcaaccttccgactaaagacggtaagacggtattcgacttggtgtttgaaaacagaaacatcttatacaagtcggatgtcattcacgacatcatcagacacagactgaaagtatctctacctatgatcaaatcgttgttctataggatgtccgagttctctccctacaacgattactacgtaaagaagataatagcctactgcgtattaagggacgagtcattcgcggaactgcatcgtaaattctgtttaaacgatgactataaaagtgtatttatgaaaaatatatcattcgatgaaatagattccatcatcgaaagatgcagtcatgacataagtcgtctcaaagagattcgaatctccgacaccgacctgtatacggtattaagaacagaagacatccggtatcacacctatctcgaagccatacattcggacaaacacatttcatttcccatgtacgacgatctcatagaacagtgccatctatcgatgaagtataaaagtaaactcatcgacaaagcactcgataaattagagtctaccatcgatggtcaatctagactatattatttgcctccagaaattatacgcagcatcatatccaagttaagcgactatcatctaaaaagtatgttgtacggaaagaaccattacaaacattatccatactagaaatgaaatgaaatgaaatgaaatgaaatgaaatgaaatgaaatgaaatgaaatgaaatgaaatgaaaatatttaaaaaatatctataatgattggagagcgggaacgaggtgataattactactacattattaaatcatgaagtcatatatattgctattgctgctttcatgtataatcataataaacagcgatataacaccgcatgaaccatccaacggaaagtgtaaagacaacgaatacaaacgccatcatctatgttgtttatcgtgtcctccgggaacatacgcttccagattatgcgatagcaagactaacacaaacacacaatgtacgccgtgtgcgtcggacacctttacgtctcgcaataatcatttacccgcttgtctaagttgtaacggaagatgcgatagtaatcaggtagagacgcgatcgtgtaacacgactcacaatagaatctgtgattgtgctcccggatattattgttttctcaaaggatcatccggatgcaaggcatgtgtttcccaaacaaagtgtggaataggatacggagtatccggacacacgcctaccggagacgtcgtctgttctccgtgtggtctcggaacatattctcacaccgtctcttccgtagataaatgcgaacccgtacccagtaatacctttaactatatcgatgtggaaattaatctgtatcccgtcaacgacacatcgtgtactcggacgaccactaccggtctcagtgaatccatctcaacttcggaactaacgattactatgaatcataaagactgcgatcccgtctttcgtaatggatacttctccgttcttaatgaggtagcaacttcagggttctttacaggacaaaatagatatcagaatatttcaaaggtatgcactctgaatttcgagattaaatgtaataacaaagattcttattcttcctccaaacagttaacgaaaacaaagaatgatgacgactccatcatgccgcattcggaatcggtaactctagtgggcgactgtctatccagcgtcgacatctatatactatatagtaataccaatactcaagactacgaaactgatacaatctcttatcatgtgggtaatgttctcgatgtcgatagccatatgcccggtaggtgcgatacacataaactgattactaattccaattcccagtatcccacccactttttatagtaagtttttaacccataaataaatacaataattaatttttcgtaaaagtagaaaatatattctaatttattgtatggtgaggaaatagaatcatctagaacagcaatcatgaaacaaatcgtcctggcatgcatatgcctggcggcagttgctatccctaccagtcttcagcaatcattctcatcctcatcctcgtgtacggaagaagaaaacaaacatcatatgggaatcgatgttattatcaaagtcaccaagcaagaccaaacaccgaccaatgataagatttgtcaatcagtaaccgaagttacagagtctgaagacgagtcagaagaagtcgtaaagggagatcccaccacttattacactgtcgtcggtggaggtcttacgatggactttggattcaccaaatgcccaaagatttcatccatctctgaatactctgacggaaacactgtgaatgctagattgtctagcgtgtccccaggacaaggtaaggactctcccgctatcactcgtgaagaagctctgtctatgatcaaagactgtgaaatgtctatcaacatcaaatgtagcgaagaagagaaagacagcaacatcaagacccatccagtactcgggtctaacatctcccataagaaagtgagttacgaagatatcatcggatcaacgatcgtcgatacgaaatgcgtcaagaatctagagattagcgttcgtataggagacatgtgcaaggaatcatctgaacttgaggtcaaggatggattcaagtatgtcgacggatcggcatcggaagatgcagccgatgatacttcactcatcaattcagcaaaacttatagcgtgtgtctgaatcgataaccctattcatctgaaattggatgagtagggttaatcgagcgattcaggcacaccacaaactaaaaaaagtgtaccggacactatattccggtttgcaaaacaaaaatgttcttaactacattcacaaaaagttacctctcgcgacttcttctttttctgtctcaatatgtgatacgattatgatcactaaaatattaaacctctttctgatggagtaacaaaaatatttttattctctttctctcttcaatggtctcataaaaaaagttttacaaaaatatttttattctctttctctcttcaatggtctcataaaaaaagttttacaaaaatatttttattctctttctctcttcaatggtctca

SEQ ID NO: 4 - DNA, 175860 bp, Vaccinia virus
  source 1..175860: mol_type = genomic DNA
atcaaccatcgaccccattacgatagtatgcaggcaacccccattagagaggtacgtgtaatcagtctctccagttttagtatttttataagtcattgttacataaacggcttttaaacagtctcctcgataataagccatatctggaaatttattaaatactcgagtcattttacgcacggtcaaaaaagtaagtaatgtcgacgacttcttacattctatagaaacacctagaatactcattttcttttggaaaatatcctcagactctgatttgaacaatgcacgacctatagtaaaccgtgaccaataagttatattagtcaatggtatatccaaaccatcaggtgtggatagtccagtctttggtatcgatagtgtagttattgaactgagaagttaccgtatagtctttttggtcatctctaaacaaggaaactaatacctctacactattgaacgatttatcttccgtaatgggtggactagcgatggatgaagtcacgaatataagacacgctattaatccgtatatcatcattttgatattacttataataacgatttgtttaatttttagtttatactattaattgtaaatgatattattatttttttaagtattatcagctttagtttatactattactatttgtaatatttagacatagataaacgtgataaaagtctatttgtttatatttattgcggatagcagtatttccctataaaaagtatacgtcctgtggtgtctttaatcatgtacatgaatggatggtttatgtagaccttcgtacgatataccatcgaaaagttaatcgtaaatactcctgtaacggccgatgcttctgtatactcctcattaacatctataaacgtcgtatgtagaaatttttctacagtgatagtttcattacacatcttgctaaaatctgcataatatccgaatatattagtaagtcctaaattttctaaaatcggtaccagattatacggttctgtcatttccactttaaactttggcatatacaagtctatacttttagtagataacataccacaccattttttaaatttttcatctgttatatttttttctatgttatatataccttctatgtcgtccggtagtataatcaccatactagagtttccctcgtatggaatatcgataatagagaatcctccgaataattcattaatatgtacatattgcaagttattctcggtacccaccatcatatcaacactggtaactatattcttagaaatataaaacttgtctgtatatgtaagatgtttagaaaatggatatttccacattgctttaaaatggacggcgctaacaactgtcatacgagtattaatggatagcggactagtcaataaggaattaattttaccatttgtcattgtcttaacccattcgttgattagttcctttgtttggttagcattattaaagtttacagtttgaaaatcgtcttttattttttgtaggaaggaggcgtggaactcgatactatcgctaccgtatattttatttgcggtagctagtgtcgcacaatacggaatatctacgtccatgtcattattgtcatcgggtgtattctcattcatattctctatatattttgatagttgttcagctgtagaaccagctgctccatgatttagaatagataaagtagataaaatagaaactggagaaatcaaaacattttcatcagggtgttttacgattagttctttaaagatatccatggtatagaccaaacaataacgataacgatatatatcataaataaataatgttaaatttcagtttatgtttgtaccccgtattcatacttaacaaattggtattgcgtacacaatcaatcatattacataccattaataatgcaagcataaaaaatcgttagtagatgtttctaaatataggttccgtaagcaaagaatataagaatgaagcggtaatgataaaatcaatcgttatctaaaatgatcatactcatttattttattctattatattaacacatacatttttaacagcaacacattcaatattgtattgttatttttatattatttacacaattaacaatatattattagtttatattactgaattaataatataaaattcccaatcttgttataaacacacactgagaaacagcataaacacagaatccatcaaaaatgtcgatgaaatatctgatgttgttgttcgctgctatgataatcagatcattcgccgatagtggtaacgctatcgaaacgacattgccagaaattacaaacgctacaacagatattccagctatcagattatgcggtccagagggagatggatattgtttacacggtgactgtatccacgctagagatatcgacggtatgtattgtagatgctctcatggttatacaggcattagatgtcagcatgtagtattagtagactatcaacgttcagaaaacccaaacactacaacgtcatatatcccatctcccggtattatgcttgtattagtaggcattattattattattacgtgttgtctattatctgtttataggttcactcgaagaactaataaactacctctacaagatatggttgtgccataatttttataaattttttttatgagtatttttacaaaaatgtataaagtgtatgtcttatgtatatttataaaaatgctaaatatgcgatgtatctatgttatttgtatttatctaaacaatacctctacctctagatattatacaaaaattttttatttcagcatattaaagtaaaatctagttaccttgaaaatgaatacagtgggtggttccgtatcaccagtaagaacataatagtcgaatacagtatccgattgagattttgcatacaatactagtctagaaagaaatttgtaatcatcttctgtgacgggagtccatatatctgtatcatcgtctagtttatcagtgtcccatgctatattcctgttatcatcattagttaatgaaaataactctcgtgcttcagaaaagtcaaatattgtatccatacatacatctccaaaactatcgcttatacgtttatctttaacgatacctatacctagatggttatttactaacagacattttccagatctattgactataactcctatagtttccacatcaaccaagtaatgatcatctattgttatataacaataacataactcttttccgtttttatcagtatgtatatctatattaacgtcgtcgttgtagtgaatagtagttattgatctattatatgaaacggatatgtctagaacggcaattgttttacgtccagttaacactttctttgatttaaagtctagagtctttgcaaacataatatccttatccgactttatatttcctgtagggtggtataattttattttgcctccacatatcggtgtttccaaatatattactagacaatattccatatagttattagttaagggtacccaattagaacacgtacgcttattatcatcatttggatcgtatttcataaaagttattgtactatcgatgtcaacacattctacattttttaatcgtctatatagtatttttctgatattttctataatatcagaattgtcttccatcggaagttgtatactatcagaatcagttacatgtttaaataattctctgatgtcattccttatacaatcaaattcattattaaacagtttaatagtctgtagacctttatcgtcgtaaatatccattgtcttattagttacgcttatttttatgtgtttttacgttgctttattatattttataagaatgattgtttgacgaatcacgagaactattaagacatatattattagaggtatatattataaaaaagtttttgattacgatgttataagaggaaagaggacacattaacatcatacatcaattaactacattcttataacatcgtaatcaaaagaattgcaattttgatgtataacaactgtcaatgggttatggaattgtatattacatattatacggtatgttggtaacgacaaataccgatcggtaattgtctgccggtgtaatagaattatatatatctatctattacaccggctgagtacctacactattatatgattatagtttctatttttacagtaccttaactaaagtctctagtcacaagagcaatactaccaacctacactattatatgattatagtttctatttttataggaacgcgtacgagaaaatcaaatgtctaatttctaacggtagtgttgataaacgattatcgtcaatggatacctcctctatcatgtcgtctattttcttactttgttctattaacttattagcattatatattatttgattataaaacttatattgcttattagcccaatctgtaaatatcggattattaacatatcgtttctttgtaggtttatttaacatgtacatcactgtaagcatgtccgtaccatttattttaatttgacgcatatccgcaatttctttttcgcagtcggttataaattctatatatgatggatacatgctacatgtgtacttataatcgactaatatgaagtacttgatacatattttcagtaacgatttattattaccacctatgaataagtacctgtgatcgtctaggtaatcaactgttttcttaatacattcgatggttggtaatttactcagaataatttccaatatcttaatatataattctgctatttctggaatatatttatctgccagtataacacaaatagtaatacatgtaaacccatattttgttattatattaatgtctgcgccattatctattaaccattctactaggctgacactatgcgacttaatacaatgataaagtatactacatccatgtttatctattttgtttatatcatcaatatacggcttacaaagttttagtatcgataacacatccaactcacgcatagagaaggtagggaataatggcataatatttattaggttatcatcattgtcattatctacaactaagtttccattttttaaaatatactcgacaactttaggatctctattgccaaatttttgaaaatatttatttatatgcttaaatctatataatgtagctccttcatcaatcatacatttaataacattgatgtatactgtatgataagatacatattctaacaatagatcttgtatagaaactgtatatcttttaagaattgtggatattaggatattattacgtaaactattacacaattctaaaatataaaacgtatcacggtcgaataatagttgatcaactatataattatcgattttgtgatttttcttcctaaactgtttacgtaaatagttagatagaatattcattagttcatgaccactatagttactatcgaataacgcgtcaaatatttcccgtttaatatcgcatttgtcaagataataatagagtgtggtatgttcacgataagtataataacgcatctcttttttgtgtgaaattaaatagtttattacgtccaaagatgtagcataaccatcttgtgacctagtaataatataataatagagaactgttttacccattctatcatcataatcagtggtgtagtcgtaatcgtaatcgtctaattcatcatcccaattataatattcaccagcacgtctaatctgttctattttgatcttgtatccatactgtatgttgctacatgtaggtattcctttatccaataatagtttaaacacatctacattgggatttgatgttgtagcgtatttctctacaatattaataccatttttgatactatttatttctatacctttcgaaattagtaatttcaataagtctatatcgatgttatcagaacatagatattcgaatatatcaaaatcattgatatttttatagtcgactgacgacaataacaaaatcacaacatcgtttttgatattattatttttcttggtaacgtatgcctttaatggagtttcaccatcatactcatataatggatttgcaccactttctatcaatgattgtgcactgctggcatcgatgttaaatgttttacaactatcatagagtatcttatcgttaaccatgattggttgttgatgctatcgcattttttggtttctttcatttcagttatgtatggatttagcacgtttgggaagcatgagctcatatgatttcagtactgtagtgtcagtactattagtttcgatcagatcaatgtctagatctatagaatcaaaacacgataggtcagaagataatgaatatctgtacgcttctttttgtactgtaacttctcgttttgttagatgtttgcatcgtgctttaacatcaatggtacaaattttatcctcgctttgtgtatcatattcgtccctactataaaattgtatattcagattatcatgagatgtgtatacgctaacggtatcaataaacggagcacaccatttagtcataaccgtaatccaaaaatttttaaagtatatcttaacgaaagaagttgtatcatcgttaggatttggtaaatcattatctacagtgtatggtactagatcctcataagtgtatatatctagagtaatgtttaatttatcaaatggttgataatatggatcctcatgacaatttccgaagatggaaatgagatatagacatgcaataaatctaatcgaagacatggttactccttaaaaaaatacgaataatcaccttggctatttagtaagtgtcatttaacactatactcatattaatccatggactcataatctctatacgggattaacggatgttctatatacggggatgagtagttctcttctttaactttatactttttactaatcatatttagactgatgtatgggtaatagtgtttgaagagctcgttctcatcatcagaataaatcaatatctctgtttttttgttatacagatgtattacagcctcatatattacgtaatagaacgtgtcatctaccttattaactttcaccgcatagttgtttgcaaatacggttaatcctttgacctcgtcgatttccgaccaatctgggcgtataatgaatctaaactttaatttcttgtaatcattcgaaataatttttagtttgcatccgtagttatcccctttatgtaactgtaaatttctcaacgcgatatctccattaataatgatgtcgaattcgtgctgtatacccatactgaatggatgaacgaataccgacggcgttaatagtaatttactttttcatctttacatattgggtactagttttactatcataagtttataaattccacaagctactatggaataagccaaccatcttagtataacacacatgtcttaaagtttattaattaattacatgttgttttatatatcgctacgaatttaaacagagaaatcagtttaggaaaaaaaattatctatctacatcatcacgtctctgtattctacgatagagtgctactttaagatgagacatatccgtgtcatcaaaaatatactccattaaaatgattattccggcagcgaacttgatattggatatatcacaacctttgttaatatctacgacaatagacagcagtcccatggttccataaacagtgagtttatctttctttgaagagatattttgtagagatcttataaaactgtcgaatgacatcgcatttatatctttagctaaatcgtatatgttaccatcgtaatatctaaccgcgtctatcttaaacgtttccatcgctttaaagacgtttccgatagatggtctcatttcatcagtcatactgagccaacaaatataatcgtgtataacatctttgatagaatcagactctaaagaaaacgaatcggctttattatacgcattcatgataaacttaatgaaaaatgtttttcgttgtttaagttggatgaatagtatgtcttaataattgttattatttcattaattaatatttagtaacgagtacactctataaaaacgagaatgacataactagttatcaaagtgtctaggacgcgtaattttcatatggtatagatcctgtaagcattgtctgtattctggagctattttctctatcgcattagtgagttcagaatatgttataaatttaaatcgaataacgaacataactttagtaaagtcgtctatattaactcttttattttctagccatcgtaataccatgtttaagatagtatattctctagttactacgatctcatcgttgtctagaatatcacatactgaatctacatccaattttagaaattggtctgtgttacatatctcttctatattattgttgatgtattgtcgtagaaaactattacgtagaccattttctttataaaacgaatatatagtactccaattatctttaccgatatatttgcacacataatccattctctcaatcactacatctttaagattttcgttgttaagatatttggctaaactatataattctattagatcatcaacagaatcagtatatatttttctagatccaaagacgaactctttggcgtcctctataatattcccagaaaagatattttcgtgttttagtttatcgagatctgatctgttcatatacgccatgattgtacggtacgttatgataaccgcataaaataaaaatccattttcatttttaaccaatactattcataattgagattgatgtaatactttgttactttgaacgtaaagacagtacacggatccgtatctccaacaagcacgtagtaatcaaatttggtgttgttaaacttcgcaatattcatcaatttagatagaaacttatactcatcatctgttttaggaatccatgtattattaccactttccaacttatcattatcccaggctatgtttcgtccatcatcgttgcgcagagtgaataattcttttgtattcggtagttcaaatatatgatccatgcatagatcggcaaagctattgtagatgtgatttttcctaaatctaatataaaactcgtttactagcaaacactttcctgatttatcgaccaagacacatatggtttctaaatctatcaagtggtggggatccatagttatgacgcagtaacatatattattacattcttgactgtcgctaatatctaaatatttattgttatcgtattggattctgcatatagatggcttgtatgtcaaagatatagaacacataaccaatttatagtcgcgctttacattctcgaatctaaagttaagagatttagaaaacattatatcctcggatgatgttatcactgtttctggagtaggatatattaaagtctttacagatttcgtccgattcaaataaatcactaaataatatcccacattatcatctgttagagtagtatcattaaatctattatattttatgaaagatatatcactgctcacctctatatttcgtacatttttaaactgtttgtataatatctctctgatacaatcagatatatctattgtgtcggtagacgataccgttacatttgaattaatggtgttccattttacaacttttaacaagttgaccaattcatttctaatagtatcaaactctccatgattaaatattttaatagtatccattttatatcactacggacacaaagtagctgacataaaccattgtataatttttatgttttatgtttattagcgtacacattttggaagttccggcttccatgtatttcctggagagcaagtagatgatgaggaaccagatagtttatatccgtacttgcacttaaagtctacattgtcgttgtatgagtatgatcttttaaacccgctagacaagtatccgtttgatattgtaggatgtggacatttaacaatctgacacgtgggtggatcggaccattctcctcctgaacacaggacaccagagttaccaatcaacgaatatccactattgcaactataagttacaacgcttccatcggtataaaaatcctcgtatccgttatgtcttccgttggatatagatggaggggattggcatttaacagattcacaaataggtgcctcgggattccataccatagatccagtagatcctaattcacaatacgatttagattcaccgatcaaatgatatccgctattacaagagtacgttatactagagccaaagtctactccaccaatatcaagttggccattatcgatatctcgaggcgatgggcatctccgtttaatacattgattaaagagtgtccatccagtacctgtacatttagcatatataggtcccattttttgctttctgtatccaggtagacatagatattctatagtgtctcctatgttgtaattagcattagcatcagtctccacactattcttaaatttcatattaatgggtcgtgacggaatagtacagcatgatagaacgcatcctattcccaacaatgtcaggaacgtcacgctctccaccttcatatttatttatccgtaaaaatgttatcctggacatcgtacaaataataaaaagcccatatatgttcgctattgtagaaattgtttttcacagttgctcaaaaacgatggcagtgacttatgagttacgttacactttggagtctcatctttagtaaacatatcataatattcgatattacgagttgacatatcgaacaaattccaagtatttgattttggataatattcgtattttgcatctgctataattaagatataatcaccgcaagaacacacgaacatctttcctacatggttaaagtacatgtacaattctatccatttgtcttccttaactatatatttgtatagataattacgagtctcgtgagtaattccagtaattacatagatgtcgccgtcgtactctacagcataaactatactatgatgtctaggcatgggagacttttttatccaacgatttttagtgaaacattccacatcgtttaatactacatatttttcatacgtggtataaactccacccattacatatatatcatcgtttacgaataccgacgcgcctgaatatctaggagtaattaagtttggaagtcttatccatttcgaagtgccgtgtttcaaatattctgccacacccgttgaaatagaaaattctaatcctcctattacatataactttccatcgttaacacaagtactaacttctgattttaacgacgacatattagtaaccgttttccattttttcgtttcaagatctacccgcgatacggaataaacatgtctattgttaatcatgccgccaataatgtatagacaattatgtaaaacatttgcattatagaattgtctatctgtattaccgactatcgtccaatattctgttctaggagagtaatgggttattgtggatatataatcagagtttttaatgactactatattatgttttataccatttcgtgtcactggctttgtagatttggatatagttaatcccaacaatgatatagcattgcgcatagtattagtcataaacttgggatgtaaaatgttgatgatatctacatcgtttggatttttatgtatccactttaataatatcatagctgtaacatcctcatgatttacgttaacgtcttcgtgggataagatagttgtcagttcatcctttgataattttccaaattctggatcggatgtcaccgcagtaatattgttgattatttctgacatcgacgcattatatagttttttaattccatatcttttagaaaagttaaacatccttatacaatttgtggaattaatattatgaatcatagtttttacacatagatctactacaggcggaacatcaattattacggcagcaactagtatcatttctacattgtttatggtgatgtttatcttcttccagcgcatatagtctaatagcgattcaaacgcgtgatagtttataccattcaatataatcgcttcatcctttagatggtgatcctgaatgcgtttaaaaaaattatacggagacgccgtaataatttccttattcacttgtataatttccccattgatagaaaatatcacgctttccattcttgaagtactataagtaattatagtataatgtaaaggtttatatattcaatattttttataaaaaaatcatttcgacattaattcctttttaaatttccgtctatcatctatagaaacatattctatgaatttataaaatgcttttacgtgtcctatcgtaggcgatagaaccgctaaaaagcctatcgaatttctacaaaagaatctgttatatggtatagggagagtataaaacattaaatgtccgtacttattaaagtattcagtagccaatcctaactctttcgaatacttattaatggctcttgttctgtacgaatctatttttttgaacaacggacctagtggtatatcttgttctatgtatctaaaataatgtctgactagatccgttagtttaatatcctcagtcatcttgtctagaatggcaaatctaactgcgggtttaggctttagtttagtttctatatctacatctatgtctttatctaacaccaaaaatataatagctaatattttattacaatcatccggatattcttctacgatctcactaactaatgtttctttggttatactagtatagtcactatcggacaaataaagaaaatcagatgatcgatgaataatacatttaaattcatcatctgtaagatttttgagatgtctcattagaatattattagggttagtactcattatcattcggcagctattacttattttattatttttcaccatatagatcaatcattagatcatcaaaatatgtttcaatcatcctaaagagtatggtgaatgactcttcccatctaatttctgaacgttcaccaatgtctctagccactttggcactaatagcgatcattcgcttagcgtcttctatattattaactggttgattcaatctatctagcaatggaccgtcggacagcgtcattctcatgttcttaatcaatgtacatacatcgccgtcatctaccaattcatccaacaacataagctttttaaaatcatcattataataggtttgatcgttgtcatttctccaaagaatatatctaataagtagagtcctcatgattagttaacaactattttttatgttaaatcaattagtacaccgctatgtttaatacttattcatattttagtttttaggattgagaatcaatacaaaaattaatgcatcattaattttagaaatacttagtttccacgtagttaatgaaacatttgaactcatcgtacaggacgttctcgtacaggacgtaactataaaccggtttatatttgttcaagatagatacaaatccgataactttttttacgaattctacgggatccactttaaaagtgtcataccgggttctttttatttttttaaacagatcaatggtgtgatgttgattaggtcttttacgaatttgatatagaatagcgtttacatattctccataatggtcaatcgccatttgttcgtatgtcataaattctttaattatatgacactgtgtattgtttagttcatccttgttcattgttaggaatctattcaaaatggcaattatactagaactataggtgcgttgtatacacatattgatgtgtctgtttatacaatccatgatatttggatccatgctactaccttcgggtaaaattgtagcatcatataccatttctagtactttaggttcattgttatccattgcagaggacgtcatgatcgaatcataaaaaaatatattatttttatgttattttgttaaaaataatcatcgaatacttcgtaagatactccttcatgaacataatcagttacaaaacgtttatatgaagtaaagtatctacgatttttacaaaagtccggatgcataagtacaaagtacgcgataaacggaataataatagatttatctagtttatctttttctatagctttcatagttagatacatggtctcagaagtaggattatgtaacatcagcttcgataaaatgactgggttatttagtcttacacattcgctcatacatgtatgaccgttaactacagagtctacactaaaatgattgaacaatagatagtctaccattgtttcgtattcagatagtacagcgtagtacatagcatcttcacaaattatatcattgtctaatagatatttgacgcatcttatggatcccacttcaacagccatcttaaaatcggtagaatcatattgctttcctttatcattaataatttctagaacatcatctctatcataaaagatacaaatattaactgtttgatccgtaataacattgctagtcgatagcaatttgttaataagatgcgctgggctcaatgtcttaataagaagtgtaagaggactatctccgaatttgttttgtttattaacatccgttgatggaagtaaaagatctataatgtctacattcttgactgttttagagcatacaatatggagaggtgtatttccatcatgatctggttttgagggactaattcctagtttcatcatccatgagattgtagaagcttttggattgtctgacataagatgtctatgaatatgatttttgccaaatttatccactatcctggcttcgaatccgatggacattatttttttaaacactctttctgaaggatctgtacacgccaacaacggaccacatccttcttcatcaaccgagttgttaatcttggctccatactgtaccaataaatttattctctctatgacttcatcatctgttcccgagagataatatagaggtgttttattatgtttatcacacgcgtttggatctgcgccgtgcgtcagcagcatcgcgactattctattattattaattttagaagctatatgcaatggataatttccatcatcatccgtctcatttggagagtatcctctatgaagaagttcttcgacaaatcgttcatctagtcctttaattccacaatacgcatgtagaatgtgataattatttccagaaggttcgatagcttgtagcatattcctaaatacatctaaatttttactattatatttggcataaagagatagataatactcggccgacataatgttgtccattgtagtataaaaattaatatttctatttctatttctgtatatttgcaacaatttactctctataacaaatatcataacttagttcttttatgtcaagaaggcactggtttagttcatctataaatgtcacgccataactaccacgcatgccatactcagaattatgataaagatatttatccttggggtgtaggtaatggggattaatctttgttggatcagtctctaagttaacacatgtcacacatgatccatttatagttatatcacacgatgatgatttatgaattgattccggaagatcgctatcgtattttgtggttccacaattcatttccatacatgttattgtcacactaatattatgatgaactttatctagccgctgagtggtaaacaacagaacagatagtttattatctttaccaacaccctcagccgctgccacaaatctctgatccgtatccatgatggtcatgtttatttctagtccgtatccagtcaacactatgttagcatttctgtcgatatagctttcactcatatgacactcaccaataatagtagaattaatgtcgtaatttacaccaatagtgagttcggcggcaaagtaccaataccggtaatcttgtcgaggaggacatatagtattcttgtattctaccgaatacccgagagatgcgatacaaaagagcaagactaatttgtaaaccatcttactcaaaatatgtaacaatagtacgatgcaatgagtaagacaataggaaatctatcttatatacacataattattctatcaattttaccaattagttagtgtaatgttaacaaaaatgtgggagaatctaattagtttttctttacacaattgacgtacatgagtctgagttccttgtttttgctaattatttcatccaatttattattcttgacgatatcgagatcttttgtataggagtcagacttgtattcaacatgcttttctataatcatcttagttatttcggcatcatccaatagtacattttccagattaacagagtagatattaatgtcgtatttgaacagagcctgtaacatctcaatgtctttattatctatagccaatttaatgtccggaatgaagagaagggaattattggtgtttgtcgacgtcatatagtcgagcaagagaatcatcatatccacgtgtccattttttatagtggtgtgaatacaactaaggagaatagccagatcaaaagtagatggtatttctgaaagaaagtatgatacaatacttacatcattaagcatgacggcatgataaaatgaagttttccatccagttttcccatagaacatcagtctccaatttttcttaacaaacagtttcaccgtttgcatgttaccactatcaaccgcataatacaatgcggtgtttcctttgtcatcaaattgtgaatcatccattccactgaatagcaaaatctttactattttggtatcttctaatgtggctgcctgatgtaatggaaattcattctctagaagatttttcaatgctccagcgttcaacaacgtacatactagacgcacgttattatcagctattgcataatacaaggcactatgtccatggacatccgccttaaatgtatctttactagagagaaagcttttcagctgcttagacttccaagtattaattcgtgacagatccatgtctgaaacgagacgctaattagtgtatattttttcattttttataattttgtcatattgcaccagaattaataatatctctaatagatctgattagtagatacatggctatcgcaaaacaacatatacacatttaataaaaataatatttattaagaaaattcagatttcacgtacccatcaatataaataaaataatgattccttccaccgtatccataaacaatattaaggagattctaccttacccataaacaatataaatccagtaatatcatgtctaatgatgaacacaaatggtgtattaaattccagtttttcaggagatgatctcgccgtagctaccatgatagtagatgcctctgctacagttccttgttcgtcgacatctatctttgcattctgaaacattttataaatatataatgggtccctagtcatatgtttaaacgacgcattatctggattaaacatactaggagccatcatttcggctatcgacttaatatccctcttattttcgatagaaaatttagggagtttaagattgtacactttattccctaattgaaacgaccaatagtctaattttgcagccgtaatagaatctgtgaaatgggtcatattatcacctattgccaggtacatactaatattagcatccttatacggaaggcgcaccatatcatattcttcgtcatcgattgtgattgtatttccttgcaatttagtaactacgttcatcatgggaaccgttttcgtaccgtacttattagtaaaactagcattgcgtgttttagtgatatcaaacggatattgccatgtacctttaaaatatatagtattaatgattgcccatagagtattattgtcgagcatattagaatctactacattagacataccggatctacgttctactatagaattaattttattaaccgcatctcgtctaaagtttaatctatataggccgaatctatgatattgttgataatacaacggtttaatgcacacagtattatctacgaaactttgataagttagatcagtgtacgtatatttagatgttttcagcttagctaatcctgatattaattctgtaaatgctggacccagatctctttttctcaaatccatagtcttcaataattctattctagtattacctgatgcaggcaatagcgacataaacatagaaaacgaataaccaaacggtgagaagacaatattatcatcttgaatatttttatacgctactataccggcattggtaaatccttgcagacgataggtagacactgaacacgttaacgatagtatcaataacgcaatcatgattttatggtattaataattaaccttatttttatgttcggtataaaaattattgatgtctacacatccttttgtaattgacatctatatatccttttgtataatcaactctaatcactttaacttttacagttttccctaccagtttatccctatattcaacatatctatccatatgcatcttaacactctctgccaagatagcttcagagtgaggatagtcaaaaagataaatgtatagagcataatccttctcgtatactctgccctttattacatcgcccgcattgggcaacgaataacaaaatgcaagcatcttgttaacgggctcgtaaattgggataaaaattatgtttttatatctattttattcaagagaatattcaggaatttctttttccggttgtatctcatcgcagtatatatcatttgtacattgtttcatattttttaatagtttacaccttttagtaggactagtatcgtacaattcatagctgtattttgaattccaatcacgcataaaaatatcttccaattgttgacgaagacctaatccatcatccggtgtaatattaatagatgctccacatgtatccgtaaagtaatttcctgtccaatttgaggtacctatataggccgttttatcggttaccatatatttggcatggtttaccctagaatacggaatgggaggatcagcatctggtacaataaatagctttacttctatatctatgtttttagattttagcatagcgatagatcttaaaaagtttctcatgataaacgaagatcgttgccagcaactaatcaatagcttaacggatacttgtctgtctatagcggatcttcttaattcatcttctatataaggccaaaacaaaattttacccgccttcgaataaataatagggataaagttcataacagatacataaacgaatttactcgcatttctaatacatgacaataaagcggttaaatcattggttctttccatagtacatagttgttgcggtgcagaagcaataaatacagagtgtggaacaccacttacgttaatactaagaggatgatctgtattataatacgacggataaaagtttttccaattatatggtagattgttaactccaagataccagtatacctcaaaaatttgagtgagatccgctgccaagttcctattattgaagatcgcaatacccaattctttgacctgagttagtgatctccaatccatgttagcgcttcctaaataaatatgtgtattatcagatatccaaaattttgtatgaagaactcctcctaggatatttgtaatatctatgtatcgtacttcaactccggccatttgtagtctttcaacatcctttaatggtttgttagatttattgacggctactctaactcgtactcctcttttgggtaattgtacaatctcgtttaatattatcgtgccgaaattcgtacccacttcatccgataaactccaataaaaagatgatatatctagtgtttttgtggtattggatagaatttccctccacatgttaaatgtagacaaatatactttatcaaattgcatacctataggaatagtctctgtaatcactgcgattgtattatccggattcattttatttgttaaaagaataatcctatatcacttcactctattaaaaatccaagtttctatttctttcatgactgattttttaacttcatccgtttccttatgaagatgatgtttggcaccttcataaatttttatttctctattacaatttgcatgttgcatgaaataatatgcacctgaaacatcactaatctcattgtttgttccctggagtatgagagtcggggggtgttaatcttggaaattatttttctaaccttgttggtagccttcaagacctgactagcaaatccagccttaattttttcatgattgattaatgggtcgtattggtatttataaactttatccatatctctagatactgattctggacatagctttccgactggcgcatttggtgtgatggttcccataagtttggcagctagcagattcagtcttgaaacagcatctgcattaactagaggagacattagaatcattgctgtaaacaagtttggattatcgtaagaggctagtatagaaattgttgctcccatggaatgacccaataagtagatttaatagttaccacgtgctgtaccaaagtcatcaatcatcattttttcaccattacttcttccatgtccaatatgatcatgtgagaatactaaaattcctaacgatgatatgttttcagctagttcgtcataacgtccagaatgtttaccagctccatgacttatgaatactaatgccttaggatatgtaataggtttccaatatatgtaatcattgtccagattgaacatacagtttgcactcatgattcacgttatataactatcaatattaacagttcgtttgatgatcatattatttttatgttttattgataattgtaaaaacatacaattaaatcaatatagaggaaggagacggatactgtcttttgtgagatagtcatggcgactaaattagattatgaggatgctgttttttactttgtggatgatgataaaatatgtagtcgcgactccatcatcgatctaatagatgaatatattacgtggagaaatcatgttatagtgtttaacaaagatattaccagttgtggaagactgtacaaggaattgatgaagttcgatgatgtcgctatacggtactatggtattgataaaattaatgagattgtcgaagctatgagcgaaggagaccactacatcaattttacaaaagtccatgatcaggaaagtttattcgctaccataggaatatgtgctaaaatcactgaacattggggatacaaaaagatttcagaatctagattccaatcattgggaaacattacagatctgatgaccgacgataatataaacatcttgatactttttctagaaaaaaaattgaattgatgatataggggtcttcataacgcataattattacgttagcattctatatccgtgttaaaaaaaattatcctatcatgtatttgagagttttatatgtagcaaacatgatagctgtgatgccaataagctttagatattcacgcgtgctagtgttagggatggtattatctggtggtgaaatgtccgttatataatctacaaaacaatcatcgcatatagtatgcgatagtagagtaaacatttttatagtttttactggattcatacatcgtctacccaattcggttataaatgaaattgtcgccaatcttacacccaaccccttgttatccattagtatagtattaacttcgttatttatgtcataaactgtaaatgattttgtagatgccatatcatacatgatattcatgtccctattataatcattactaactttatcacaatatatgttgataatatctatatatgatctagtctttgtgggcaactgtctatacaagtcgtctaaacgttgtttactcatatagtatcgaacagccatcattacatggtcccgttccgttgatagataatcgagtatgttagtggacttgtcaaatctatataccatattttctggaagtggatatacatagtcgtgatcaacattattgctagcctcatcttctatatcctgtactataccattatctatatcatctacataatctacgatattattacacataaacatcgacaacatactattgtttattatctaagtcctgttgatccaaacccttgatctcctctatttgtactatctagagattgtacttcttccagttctggataatatatacgttgatagattagctgagctattctatctccagtatttacattaaacgtacattttccattattaataagaatgactcctatgtttcccctataatcttcgtctattacaccacctcctatatcaatgccttttagtgacagaccagacctaggagctattctaccatagcaaatcttaggcatggacatactaatatctgtcttaattaactgtctttctcctggagggatagtataatcgtaagcgctatacaaatcatatccggcagcacccggcgattgcctagtaggagatttagctctgttagtttccttaacaaatctaactggtgagttaatattcatgttgaacataaaactaatattttatttcaaaattatttaccatcccatatattccatgaataagtgtgatgattgtacacttctatagtatctatatacgatccacgataaaatcctcctatcaatagcagtttattatccactatgatcaattctggattatccctcggataaataggatcatctatcagagtccatgtattgctggattcacaataaaattccgcatttctaccaaccaagaataaccttctaccgaacactaacgcgcatgatttataatgaggataataagtggatggtccaaactgccactgatcatgattgggtagcaaatattctgtagttgtatcagtttcagaatgtcctcccattacgtatataacattgtttatggatgccactgctggattacatctaggtttcagaagactcggcatattaacccaagcagcatccccgtggaaccaacgctcaacagatgtgggatttggtagacctcctactacgtataatttattgttagcgggtatcccgctagcatacagtctggggctattcatcggaggaattggaatccaattgtttgatatataatttacagctatagcattgttatgtatttcattgttcatccatccaccgatgagatatactacttctccaacatgagtacttgtacacatatggaatatatctataatttgatccatgttcataggatactctatgaatggatacttgtatgatttgcgtggttgtttatcacaatgaaatattttggtacagtctagtatccattttacattatttatacctctgggagaaagataatttgacctgattacatttttgataaggagtagcagatttcctaatttatttcttcgctttatataccacttaatgacaaaatcaactacataatcctcatctggaacatttagttcatcgctttctagaataagtttcatagatagataatcaaaattgtctatgatgtcatcttccagttccaaaaagtgtttggcaataaagtttttagtatgacataagagattggatagtccgtattctatacccatcatgtaacactcgacacaatattcctttctaaaatctcgtaagataaagtttatacaagtgtagatgataaattctacagaggttaatatagaagcacgtaataaattgacgacgttatgactatctatatatacctttccagtatacgagtaaataactatagaagttaaactgtgaatgtcaaggtctagacaaacccttgtaactggatctttatttttcgtgtatttttgacgtaaatgtgtgcgaaagtaaggagataactttttcaatatcgtagaattgactattatattgccacctatagcatcaataattgttttgaatttcttagtcatagacaatgctaatatattcttacagtacacagtattgacaaatatcggcatttatgtttctttaaaagtcaacatctaaagaaaaatgattatcttcttgagacataactcccattttttggtattcacccacacgtttttcgaaaaaattagtttttccttccaatgatatattttccatgaaatcaaacggattggtaacattataaatttttttaaatcccaattcagaaatcaatctatccgcgacaaattctatatatgttttcatcatttcacaattcattcctataagtttaactggaagagccgcagtaagaaattcttgttcaatggatactgcatctgttataatagatctaacggtttcttcactcggtggatacaataaatgtttaaacatcaaacatgcgaagtcgcagtgcagaccctcgtctctactaattagttcgttggaaaacgtgagtccgggcattaggccacgctttttaagccaaaatatggaagcgaatgatccggaaaagaagattccttctactgcagcaaaggcaataagtctctctccataaccggcgctgtcatgtatccacttttgagcccaatcggccttcttttttacacaaggcattgtttctatggcattaaagagatagtttttttcattactatctttaacataagtatcgatcaaaagactatacatttccgaatgaatgttttcaatggccatctgaaatccgtagaaacatctagcctcggtaatctgtacttctgtacaaaatcgttccgccaaattttcattcactattccgtcactggctgcaaaaaacgccaatacatgttttataaaatatttttcgtctggtgttagtttattccaatcattgatatctttagatatatctacttcttccactgtccaaaatgatgcctctgcctttttatacatgttccagatgtcataatattggattgggaaaataacaaatctatttggatttggtgcaaggatgggttccataactaaattaacaatatcaataaattttttttcagttatctatatgcctgtacttggattttttgtacatcgatatcgccgcaatcactacaataattacaagtattattgatagcattgttattagtactatcataattaaattatcgacattcatgggtgctgaataatcgttattatcatcattatcattttgtaattgtgacatcatactagataaatcgtttgcgagattgttgtgggaagcgggcatggaggatgcattatcattattatttaacgccttccattcggattcacaaatatggcgcgcgttcaacattttatggaaactataattttgtgaaaacagataacaagaaaactcgtcatcgttcaaatttttaacgatagtaaaccgattaaacgtcgagctaatttctaacgctagcgactctgttggatatgggtttccagatatatatcttttcagttcccctacgtatctataatcatctgtaggaaatggaagatatttccatttatctactgttcctaatatcatatgtggtggtgtagtagaaccattaagcgcgaaagatgttatttcgcatcgtattttaacttcgcaataatttctggttagataacgcactctaccagtcaagtcaatgatattagcctttacagatatattcatagtagtcgtaacgatgactccatcttttagatgcgatactcctttgtatgtaccagaatcttcgtacctcaaactcgatatatttaaacaagttaatgagatattaacgcgttttatgaatgatgatatataaccagaagttttatcctcggtggctagcgctataaccttatcattataataccaactagtgtgattaatatgtgacacgtcagtgtgggtacaaatatgtacattatcgtctacgtcgtattcgatacatccgcatacagccaacaaatataaaatgacaaatactctaacgacgttcgtacccatcttgatgcggtttaataaatgttttgatttcaatttattgtaaaaaaagattcggttttatactgttcgatattctcattgcttatattttcatctatcatctccacacagtcaaatccgtggttagcatgcacctcatcaaccggtaaaagactatcggactcttctatcattataactctagaatatttaatttggtcattattaatcaagtcaattatcttatttttaacaaacgtgagtattttactcattttttataaaaacttttagaaatatacagactctatcgtgtgtctatatcttctttttatatccaatgtatttatgtctgatttttcttcatttatcatatataatggtccaaattctacacgtgcttcggattcatccagatcattaaggttcttataattgtaacatccttctcttccctcttctacatcttccttcttattcttattcttattcttattcttattcttattcttattcttattcttagcgtcacagaatctaccacagcagaatcccatgacgagcgtcatattaaactaattcattttcaattataatatacgattagtaatgaccattaaaataaaaaatattcttcataaccggcaagaaagtgaaaagttcacattgaaactatgtcagtagtatacatcatgaaatgatgatatatatattctctattttggtggaggattatatgatataattcgtggataatcattcttaagacacatttcttcattcgtaaatcttttcacgttaaatgagtgtccatattttgcaatttcttcatatgatggcggtgtacgtggacgaggctgctcctgttcttgttgtggtcgccgactatcgtgtttgcgtttagatccctccattatcgcgattgcgtagatggagtactattttataccttgtaattaaatttttttattaattaaacgtataaaaacgttccgtatctgtatttaagagccagatttcgtctaatagaacaaatagctacagtaaaaataactagaataattgctacacccactagaaaccacggatcgtaatacggcaatcggttttcgataataggtggaacgtatattttatttaaggacttaacaattgtctgtaaaccacaatttgcttcagcggatcctgtattaactatctgtaaaagcatatgttgaccgggcggagccgaacattctccgatatctaatttctgtatatctataatattattaacctccgcatacgcattacagttcttttctagcttggataccgcactaggtacatcgtctagatctattcctatttcctcagcgatagctcttctatccttttccggaagcaatgaaatcacttcaataaatgattcaaccatgagtgtgaaactaagtctagaattactcatgcatttgttagttattcggagcgcgcaatttttaaactgtcctataacctctcctatatgaatagcacaagtgacattagtagggatagaatgttgagctaatttttgtaaataactatctataaaaagattatacaaagttttaaactctttagtttccgccatttatccagtctgagaaaatgtctctcataataaatttttccaagaaactaattgggtgaagaatggaaacctttaatctatatttatcacagtctgttttggtacacatgatgaattcttccaatgccgtactaaattcgatatctttttcgatttctggatatgtttttaataaagtatgaacaaagaaatggaaatcgtaataccagttatgtttaactttgaaattgttttttattttcttgttaatgattccagccacttgggaaaagtcaaagtcgtttaatgccgatttaatacgttcattaaaaacaaactttttatcctttagatgaattattattggttcattggaatcaaaaagtaagatattatcgggtttaagatctgcgtgtaaaaagttgtcgcagcatggtagttcgtagattttaatgtataacagagccatctgtaaaaagataaactttatgtattgtaccaaagatttaaatcctaatttgatagctaactcggtatctactttatctgccgaatacagtgctaggggaaaaattataatgtttcctctttcatattcgtagttagttctcttttcatgttcgaaaaagtgaaacatgcggttaaaatagtttataacattaatattactgttaataactgccgggtaaaagtgggatagtaatttcacgaatttgatactgtcctttctctcgttaaacgcctttagaaaaactttagaagaatatctcaatgagagttcctgaccatccatagtttgtatcaataatagcaacatatgaagaacacgtttatacagagtatgtaaaaatgttaatttatagtttaatcccatggcccacgcacacacgattaattttttttcatctccctttagattgttgtatagaaatttgggtactgtgaactccgccgtagtttccatgggactatataattttgtggcctcgaatacaaattttactacatagttatctatcttaaaaactataccatatcctcctgtagatatgtgataaaaatcgtcgtttataggataaaatcgtttatccttttgttggaaaaatgatgaattaatgtaatcattctcttctatctttagtagtgtttccctattaaaattcttaaaataatttaacaatctaactgacggagcccaattttggtgtaaatctaattgggacattatgttgttaaaatataaacagtctcctaatataacagtatctgataatctatggggagacatccattgatattcaggggatgaatcattggcaacacccatttattgtacaaaaagccccaatttacaaacgaaagtccaggtttgatagagacaaactattaactattttgtctctgtttttaacacctccacagtttttaatttctttggtaatgaaattattcacaatatcagtatcttctttatctaccagagattttactaacttgataaccttggctgtctcattcaatagggtagtaatatttgtatgtgtgatattgatatctttttgaattgtttcttttagaagtgattctttgatggtgtcagcatacgaattacaataatgcagaaactcggttaacatgcaggaattatagtaagccaattccaattgttgcctgtgttgtattagagtgtcaatatgagcaatggtgtccttgcgtttctctgatagaatgcgagcagcgattttggcgttatcatttgacgatatttctggaatgacgaatcctgtttctactaactttttggtaggacaaagtgaaacaatcaagaagatagcttctcctcctatttgtggaagaaattgaactcctctagatgatctactgacgatagtatctccttgacagatattggaccgaattacagaagtacctggaatgtaaagccctgaaaccccctcattttttaagcagattgttgccgtaaatcctgcactgtgaccaagatagagagctcctttggtgaatccatctctatgtttcagtttaaccaagaaacagtcagctggtctaaaatttccatctctatctaatacagcatctaacttgatgtcaggaactatgaccggtttaatgttatatgtaacattgagtaaatccttaagttcataatcatcactgtcatcagttatgtacgatccaaacaatgtttctaccggcatagtggatacgaagatgctatccatcagaatgtttccctgattagtattttctatatagctattcttctttaaacgattttccaaatcagtaactatgttcatttttttaggagtaggacgcctagccagtatggaagaggattttctagatcctctcttcaacatctttgatctcaatggaatgcaaaaccccatagtgaaacaaccaacgataaaaataatattgtttttcactttttataattttaccatctgactcatggattcattaatatctttataagagctactaacgtataattctttataactgaactgagatatatacaccggatctatggtttccataattgagtaaatgaatgctcggcaataactaatggcaaatgtatagaacaacgaaattatactagagttgttaaagttaatattttctatgagctgttccaataaattatttgttgtgactgcgttcaagtcataaatcatcttgatactatccagtaaaccgtttttaagttctggaatattattatcccattgtaaagcccctaattcgactatcgaatatcctgctctgatagcagtttcaatatcgacggacgtcaatactgtaataaaggtggtagtattgtcatcatcgtgataaactactggaatatggtcgttagtaggtacggtaactttacacaacgcgatatataactttccttttgtaccatttttaacgtagttgggacgtcctgcagggtattgttttgaagaaatgatatcgagaacagatttgatacgatatttgttggattcctgattatttactataatataatctagacagatagatgattcgataaatagagaaggtatatcgttggtaggataatacatccccattccagtattctcggatactctattaatgacactagttaagaacatgtcttctattctagaaaacgaaaacatcctacatggactcattaaaacttctaacgctcctgattgtgtctcgaatgcctcgtacaaggatttcaaggatgccatagattctttgaccaacgatttagaattgcgtttagcatctgatttttttattaaatcgaatggtcggctctctggtttgctaccccaatgataacaatagtcttgtaaagataaaccgcaagaaaatttatacgcatccatccaaataaccctagcaccatcggatgatattaatgtattattatagattttccatccacaattattgggccagtatactgttagcaacggtatatcgaatagattactcatgtaacctactagaatgatagttcgtgtactagtcataatatctttaatccaatctaagaaatttaaaattagattttttacactgttaaagttaacaaaggtattacccgggtacgtggatatcatatatggtattggtccattatcagtaatagctccataaactgatacggcgatggtttttatatgtgtttgatctaacgaggaagaaattcgcacccacaattcatctctagatatgtatttaatatcaaacggtaacacatcaatttcgggacgcgtatatgtttctaaatttttaatccaaatataatgatgacctatatgccctattatcatactgtcaactatagtacacctagagaacttacgatacatctgtttcctataatcgttaaattttacaaatctataacatgctaaaccttttgacgacaaccattcattaatttctgatatggaatctgtattctcgataccgtattgttctaaagccagtgctatatctccctgttcgtgggaacgctttcgtataatatcgatcaacggataatctgaagtttttggagaataatatgactcatgatctatttcgtccataaacaatctagacataggaattggaggcgatgatcttaattttgtgcaatgagtcgtcaatcctataacttctaatcttgtaatattcatcatcgacataatactatctatgttatcatcgtatattagtataccatgaccttcttcatttcgtgccaaaatgatatacagtcttaaatagttacgcaatatctcaatagtttcataattgttagctgttttcatcaagatttgtaccctgtttaacatgatggcgttctatacgtttctattttctattttttaaatttttaaatttttaacgatttactgtggctagatacccaatctctctcaaatatttttttagcctcgcttacaagctgtttatctatactattaaaactgacgaatccgtgattttggtaatgggttccgtcgaaatttgccgaagtgatatgaacatattcgtcgtcgactatcaacaattttgtattattctgaatagtgaaaaccttcacagatagatcattttgaacacacaacgcgtctagacttctggcggttgccatagaatatacgtcgttcttatcccaattaccaactagaagtctgatcttaactcctctattaatggctgcttctataatggagttgtaaatgtcgggccaatagtagctattaccgtcgacacgtgtagtgggaactatggccaaatgttcaatatctatactagtcttagctgacctgagtttatcaataactacatcggtatctagatctctagaatatcccaataggtgttccggagaatcagtaaagaacactccacctataggattcttaatatgatacgcagtgctaactggcagacaacaagccgcagagcataaattcaaccatgaattttttgcgctattaaaggctttaaaagtatcaaatcttctacgaagatctgtggccagcgggggataatcagaatatacacctaacgttttaatcgtatgtatagatcctccagtaaatgacgcgtttcctacataacatctttcatcatctgacacccaaaaacaaccgagtagtagtcccacattattttttttatctatattaacggttataaaatttatatccgggcagtgactttgtagctctcccagatttcttttccctcgttcatctagcaaaactattattttaatccctttttcagatgcctcttttagtttatcaaaaataagcgctcccctagtcgtactcagaggattacaacaaaaagatgctatgtatatatatttcttagctagagtgataatttcgttaaaacattcaaatgttgttaaatgatcggatctaaaatccatattttctggtagtgtttctaccagcctacattttgctcccgcaggtaccgatgcaaatggccacatttagttaacataaaaacttatacatcctgttctatcaacgattctagaatatcatcggctatatcgctaaaattttcatcaaagtcgacatcacaacctaactcagtcaatatattaagaagttccatgatgtcatcttcgtctatttctatatccgtatccattgtagattgttgaccgattatcgagtttaaatcattactaatactcaatccttcagaatacaatctgtatttcattgtaaatttataggcggtgtatttaagttggtagattttcaattatgtatcaatatagcaacagtagttcttgctcctccttgattctagcatcctcttcattattttcttctacgtacataaacatgtccaatacgttagacaacacaccgacgatggcggccgccacagacacgaatatgactagaccgatgaccatttaaaaacccctctctagctttcacttaaactgtatcgatcattcttttagcacatgtataatataaaaaaacattattctatttcgaatttaggcttccaaaaatttttcatccgtaaaccgataataatatatatagacttgttaatagtcggaataaatagattaatgcttaaactatcatcatctccacgattagagatacaatatttacattctttttgctgtttcgaaactttatcaatacacgttaatacaaacccaggaaggagatattgaaactgaggctgttgaaaatgaaacggtgaatacaataattcagataatgtaaaatcatgattccgtattctgatgatattagaactgctaatggatgtcgatggtatgtatctaggagtatctattttaacaaagcatcgatttgctaatatacaattatcattttgattaattgttattttattcatattcttaaaaggtttcatatttatcaattcttctacattaaaaatttccatttttaatttatgtagccccgcaatactcctcattacgtttcattttttgtctataatatccattttgttcatctcggtacatagattatccaattgagaagcgcatttagtagttttgtacattttaagtttattgacgaatcgtcgaaaactagttatagttaacattttattatttgataccctgatattaatacccctgccgttactattatttataactgatgtaacccacgtaacattggaattaactatcgatagtaatgcatcgacgcttccaaaattgtctattataaactcaccgataatttttttattacatgttttcatattcattaggattatcaaatctttaatcttactacgattgtatgcgttgatattacaagacgtcattctaaaagacggaggatttccatcaaatgccagacaatcacgtacaaagtacatggaaataggttttgttctattgcgcatcatagattcatatagaacacccgtagaaatactaatttgttttactctataaaatactaatgcatctatttcatcgttttgtataacgtctttccaagtgtcaaattccaaatttttttcattgatagtaccaaattcttctatctctttaactacttgcatagataggtaattacagtgatgcctacatgccgttttttgaaactgaatagatgcgtctagaagcgatgctacgctagtcacaatcaccactttcatatttagaatatatgtatgtaaaaatatagtagaatttcattttgtttttttctatgctataaatgaattctcattttgcatctgctcatactccgttttatatcaataccaaagaaggaagatatctggttctaaaagccgttaaagtatgcgatgttagaactgtagaatgcgaaggaagtaaagcttcctgcgtactcaaagtagataaaccctcatcacccgcgtgtgagagaagaccttcgtccccgtccagatgcgagagaatgaataaccctggaaaacaagtcccgtttatgaggacggacatgctacaaaatatgttcgcggctaatcgcgataatgtagcttctagacttttgaactaaaatacaattatatctttttcgatattaataaatccgtgtcgtccaggttttttatctctttcagtatgtgaatagataggtattttatctctattcatcatcgaatttaagagatccgataaacattgtttgtattctccagatgtcagcatctgatacaacaatatatgtgcacataaacctctggcacttatttcatgtaccttccccttatcactaaggagaatagtatttgagaaatatgtatacatgatattatcatgaattagatatacagaatttgtaacactctcgaaatcacacgatgtgtcggcgttaagatctaatatatcactcgataacacattttcatctagatacactagacattttttaaagctaaaatagtctttagtagtgacagtaactatgcgattattttcatcgatgatacatttcatcggcatattattacgcttaccatcaaagactataccatgtgtatatctaacgtattctagcatagttgccatacgtgcattaaacttttcaggatctttggatagatcttccaatctatctatttgagaaaacatttttatcatgttcaatagttgaaacgtcggatccactatatagatattatctataaagattttaggaactacgttcatggtatcctggcgaatattaaaactatcaatgatatgattatcgttttcatcttttatcaccatatagtttctaagatatgggattttacttaatataatattatttcccgtaataaattttattagaaatgccaaatctataagaaaagtcctcgaattagtttgaagaatatctatatcgccgtaccgtatatttggattaattagatatagagaatatgatccgtaacatatacaacttttattatggcgtctaagatattcttccatcaacttattaacatttttgactagggaagatacattatgacgtcccattacttttgccttgtctattattgcgacgttcatagaatttagcatatctcttgccaattcttccattgatgttacattataagaaattttagatgaaattacatttggagctttaatagtaagaactcctaatatgtccgtgtatgtggtcactaatacagattgtagttctataatcgtaaataatttacctatattatatgtttgagtctgtttagaaaagtagctaagtatacgatcttttatttctgatgcagatgtatcaacatcggaaaaaaatctttttttattcttttttactaaagatacaaatatgtctttgttaaaaacagttattttttgaatatttctagcttgtaattttaacatatgatattcattcacactaggtactctgcctaaataggtttctataatctttaatgtaatattaggaaaagtattctgatcaggattcctattcattttgaggatttaaaactctgattattgtctaatatggtctctacgcaaactttttcacagagcgatagagtttttgataactcgtttttcttaagaaatataaaactactgtctccagagctcgctctatcttttattttatttaattcgatacaaactcctgatactggttcagaaagtaattcattaattttcagtcctttatagaagatatttaatatagataatacaaaatcttcagtttttgatatcgatctgattgatcctagaactagatatattaataacgtgctcattaggcagtttatggcagcttgataattagatatagtatattccagttcatatttattagataccgcattgcccagattttgatattctatgaattcctctgaaaataaatccaaaataactaaacattctattttttgtggattagtgtactctcttccctctatcatgttcactactggtgtccacgatgataaatatctagagggaatataatatagtccataggatgccaatctagcaatgtcgaataactgtaatttgattcttcgttcttcattatgaattgattcttgaggtataaacctaacacaaattatattattagacttttcgtatgtaatgtctttcatgttataagtttttaatcctggaatagaatctattttaatgaggcttttaaacgcagagttctccaacgagtcaaagcataatactctgttgtttttcttatatacgatgttacgattttcttctttgaatggaataggtttttgaattagtttataattacaacataatagataaggaagtgtgcaaatagtacgcggaaaaaacataatagctcccctgttttcatccatggttttaagtaaatgatcactggcttctttagttaatggatattcgaacattaaccgtttcatcatcattggacagaatccatatttcttaatgtaaagagtgatcaaatcattgtgtttattgtaccatcttgttgtaaatgtgtattcggttatcggatctgctcctttttctattaaagtatcgatgtcgatctcgtctaagaattcaactatatcgacatatttcatttgtatacacataaccattactaacgtagaatgtataggaagagatgtaacgggaacagggtttgttgattcgcaaactattctaatacataattcttctgttaatacgtcttgcacgtaatctattatagatgccaagatatctatataattattttgtaagatgatgttaactatgtgatctatataagtagtgtaataattcatgtatttcgatatatgttccaactctgtctttgtgatgtctagtttcgtaatatctatagcatcctcaaaaaatatattcgcatatattcccaagtcttcagttctatcttctaaaaaatcttcaacgtatggaatataataatctattttacctcttctgatatcattaatgatatagtttttgacactatcttctgtcaattgattcttattcactatatctaagaaacggatagcgtccctaggacgaactactgccattaatatctctattatagcttctggacataattcatctattataccagaattaatgggaactattccgtatctatctaacatagttttaagaaagtcagaatctaagacctgatgttcatatattggttcatacatgaaatgatctctattgatgatagtgactatttcattctctgaaaattggtaactcattctatatatgctttccttgttgatgaaggatagaatatactcaatagaatttgtaccaacaaactgttctcttatgaatcgtatatcatcatctgaaataatcatgtaaggcatacatttaacaattagagacttgtctcctgttatcaatatactattcttgtgataatttatgtgtgaggcaaatttgtccacgttctttaattttgttatagtagatatcaaatccaatggagctacagttcttggcttaaacagatatagtttttctggaacaaattctacaacattattataaaggactttgggtagataagtgggatgaaatcctattttaattaatgctatcgcattgtcctcgtgcaaatatccaaacgcttttgtgatagtatggcattcattgtctagaaacgctctacgaatatctgtgacagatatcatctttagagaatatactagtcgcgttaatagtactacaatttgtattttttaatctatctcaataaaaaaattaatatgtatgattcaatgtataactaaactactaactgttattgataactagaatcagaatctaatgatgacgtaaccaagaagtttatctactgccaatttagctgcattatttttagcatctcgtttagattttccatctgccttatcgaatactcttccgtcgatgtctacacaggcataaaatgtaggagagttactaggcccaactgattcaatacgaaaagaccaatctctcttagttatttggcagtactcattaataatggtgacagggttagcatctttccaatcaataatttttttagccggaataacatcatcaaaagacttatgatcctctctcattgatttttcgcgggatacatcatctattatgacgtcagccatagcatcagcatccggcttatccgcctccgttgtcataaaccaacgaggaggaatatcgtcggagctgtacaccatagcactacgttgaagatcgtacagagctttattaacttctcgcttctccatattaagttgtctagttagttgtgcagcagtagctccttcgattccaatgtttttaatagccgcacacacaatctctgcgtcagaacgctcgtcaatatagatcttagacatttttagagagaactaacacaaccagcaataaaactgaacctactttatcatttttttattcatcatcctctggtggttcgtcgtttctatcgaatgtagctctgattaacccgtcatctataggtgatgctggttctggagattctggaggagatggattattatctggaagaatctctgttatttccttgttttcatgtatcgattgcgttgtaacattaagattgcgaaatgctctaaatttgggaggcttaaagtgttgtttgcaatctctacacgcgtgtctaactagtggaggttcgtcagctgctctagtttgaatcatcatcggcgtagtattcctacttttacagttaggacacggtgtattgtatttctcgtcgagaacgttaaaataatcgttgtaactcacatcctttattttatctatattgtattctactcctttcttaatgcattttataccgaataagagatagcgaaggaattctttttcggtgccgctagtacccttaatcatatcacatagtgttttatattccaaatttgtggcaatagacggtttatttctatacgatagtttgtttctggaatcctttgagtattctataccaatattattctttgattcgaatttagtttcttcgatattagattttgtattacctatattcttgatgtagtactttgatgatttttccatggcccattctattaagtcttccaagttggcatcatccacatattgtgatagtaattctcggatatcagtagcggctaccgccattgatgtttgttcattggatgagtaactactaatgtatacattttccatttataacacttatgtattaactttgttcatttatattttttcattattatgttgatattaacaaaagtgaatatatatgttaataattgtattgtggttatacggctacaatttcataatgagtggaagtcagtgtccgatgatcaatgacgatagctttactctgaaaagaaagtatcaaatcgatagtgcggagtcaacaatgaaaatggataagaagaggacaaagtttcagaatagagccaaaatggtaaaagaaataaatcagacaataagagcagcacaaactcattacgagacattgaaactaggatacataaaatttaagagaatgattaggactactactctagaagatatagcaccatctattccaaataatcagaaaacttataaactattctcggacatttcagccatcggcaaagcatcacagaatccgagtaagatggtatatgctctgctgctttacatgtttcccaatttgtttggagatgatcatagattcattcgttatagaatgcatccaatgagtaaaatcaaacacaagatcttctctcctttcaaacttaatcttattagaatattagtggaagaaagattctataataatgaatgcagatctaataaatggagaataattggaacacaagttgataaaatgttgatagctgaatctgataaatatacaatagatgcaaggtataacctaaaacccatgtatagaatcaagggaaaatctgaagaagataccctcttcatcaaacagatggtagaacaatgtgtgacatcccaggaattggtggaaaaagtgttgaagatactgtttagagatttgttcaagagtggagaatacaaagcgtacagatacgatgatgatgtagaaaatggatttattggattggatacactaaaattaaacattgttcatgatatagttgaaccatgtatgcctgttcgtaggccagtggctaagatactgtgtaaagaaatggtaaataaatactttgagaatccgctacatattattggtaaaaatcttcaagagtgcattgactttgttagtgaataggcatttcatctttctccaatactaattcaaattgttaaattaataatggatagtataaatagttattagtgataaaatagtaaaaataattattagaataagagtgtagtatcatagataactctcttctataaaaatggattttattcgtagaaagtatcttatatacacagtagaaaataatatagattttttaaaggatgatacattaagtaaagtaaacaattttaccctcaatcatgtactagctctcaagtatctagttagcaattttcctcaacacgttattactaaggatgtattagctaataccaatttttttgttttcatacatatggtacgatgttgtaaagtgtacgaagcggttttacgacacgcatttgatgcacccacgttgtacgttaaagcattgactaagaattatttatcgtttagtaacgcaatacaatcgtacaaggaaaccgtgcataaactaacacaagatgaaaaatttttagaggttgccgaatacatggacgaattaggagaacttataggcgtaaattatgacttagttcttaatccattatttcacggaggggaacccatcaaagatatggaaatcatttttttaaaactgtttaagaaaacagacttcaaagttgttaaaaaattaagtgttataagattacttatttgggcttacctaagcaagaaagatacaggcatagagtttgcggataatgatagacaagatatatacactctatttcaacaaactggtagaatcgtccatagcaatctaacagaaacgtttagagattatatctttcccggagataagactagctattgggtgtggttaaacgaaagtatagctaatgatgcggatattgttcttaatagacacgccattaccatgtatgataaaattcttagttatatatactctgagataaaacaaggacgcgttaataaaaacatgcttaagttagtttatatctttgagcctgaaaaagatatcagagaacttctgctagaaatcatatatgatattcctggagatatcctatctattattgatgcaaaaaacgacgattggaaaaaatattttattagtttttataaagctaattttattaacggtaatacatttattagtgatagaacgtttaacgaggacttattcagagttgttgttcaaatagatcccgaatatttcgataatgaacgaattatgtctttattctctacgagtgctgcggacattaaacgatttgatgagttagatattaataacagttatatatctaatataatttatgaggtgaacgatatcacattagatacaatggatgatatgaagaagtgtcaaatctttaacgaggatacgtcgtattatgttaaggaatacaatacatacctgtttttgcacgagtcggatcccatggtcatagagaacggaatactaaagaaactgtcatctataaaatccaagagtaaacggctgaacttgtttagcaaaaacattttaaaatattatttagacggacaattggctcgtctaggtcttgtgttagatgattataaaggagacttgttagttaaaatgataaaccatcttaagtctgtggaggatgtatccgcattcgttcgattttctacagataaaaaccctagtattcttccatcgctaatcaaaactattttagctagttataatatttccatcatcgtcttatttcaaaggtttttgagagataatctatatcatgtagaagaattcttggataaaagcatccatctaaccaagacggataagaaatatatacttcaattgataagacacggtagatcatagaacagaccaaatatattattaataatttggtatatacatagatattaattatcacatattaaaaattcacacatttttgataaatgggaactgctgcaacaattcagactcccaccaaattaatgaataaagaaaatgcagaaatgattttggaaaaaattgttgatcatatagttatgtatattagtgacgaatcaagtgattcagaaaataatcctgaatatattgattttcgtaacagatacgaagactatagatctctcattataaaaagtgatcacgagtttgtaaagctatgtaaaaatcatgcagagaaaagttctccagaaacgcaacaaatgattatcaaacacatatacgaacaatatcttattccagtatctgaagtactattaaaacctataatgtccatgggtgacataattacatataacggatgtaaagacaatgaatggatgctagaacaactctctaccctaaactttaacaatctccgcacatggaactcatgtagcataggcaatgtaacgcgtctgttttatacattttttagttatctgatgaaagataaactaaatatataagtataatcccattctaatactttaacctgatgtattagcatcttattagaatattaacctaactaaaagacataacataaaaactcattacatagttgataaaaagcggtaggatataaatattatggctgccaccgttccgcgttttgacgacgtgtacaaaaatgcacaaagaagaattctagatcaagaaacattttttagtagaggtctaagtagaccgttaatgaaaaacacatatctatttgataattacgcgtatggatggataccagaaactgcaatttggagtagtagatacgcaaacttagatgcaagtgactattatcccatttcgttgggattacttaaaaagttcgagtttctcatgtctctatataaaggtcctattccagtatacgaagaaaaagtaaatactgaattcatagccaatggatcgttctctggtagatacgtatcatatcttcgaaagttttctgctcttccaacaaacgagtttattagttttttattattgacctccatccctatctataatatcttattctggtttaaaaacacacagtttgatattactaaacacacattattcagatacgtctatacagataatgccaaacacctggcgttggctaggtatatgcatcaaacaggagactataagcctttgtttagtcgtctcaaagagaattatatatttaccggtcccgttccaatatgtatcaaagatatagatcaccctaatcttagtagagcaagaagtccatccgattatgagacattagctaatattagtactatattgtactttaccaagtatgatccggtattaatgtttttattgttttacgtacctgggtattcaattactacaaaaattactccagccgtagaatatctaatggataaactgaatctaacaaagagcgacgtacaactgttgtaaattattttatgcttcgtaaaatgtaggttttgaaccaaacattctttcaaagaatgagatgcataaaactttattatccaatagattgactatttcggacgtcaatcgtttaaagtaaacttcgtaaaatattctttgatcactgccgagtttaaaacttctatcgataattgtctcatatgttttaatatttacaagttttttggtccatggtacattagccggacaaatatatgcaaaataatatcgttctccaagttctatagtttctggattatttttattatattcagtaaccaaatacatattagggttatctgcggatttataatttgagtgatgcattcgactcaacataaataattctagaggagacgatctactatcaaattcggatcgtaaatctgtttctaaagaacggagaatatctatacatacctgattagaattcatccgtccttcagacaacatctcagacagtctggtcttgtatgtcttaatcatattcttatgaaacttggaaacatctcttctagtttcactagtacctttattaattctctcaggtacagattttgaattcgacgatgctgagtatttcatcgttgtatatttcttcttcgattgcataatcagattcttatataccgcctcaaactctattttaaaattattaaacaatactctattattaatcagtcgttctaactctttcgctatttctatagacttatcgacatcttgactgtctatctctgtaaacacggagtcggtatctccatacacgctacgaaaacgaaatctgtaatctataggcaacgatgttttcacaatcggattaatatctctatcgtccatataaaatggattacttaatggattggcaaaccgtaacataccgttagataactctgctccatttagtaccgattctagatacaagatcattctacgtcctatggatgtgcaactcttagccgaagcgtatgagtatagagcactatttctaaatcccatcagaccatatactgagttggctactatcttgtacgtatattgcatggaatcatagatggccttttcagttgaactggtagcctgttttaacatctttttatatctggctctctctgccaaaaatgttcttaatagtctaggaatggttccttctatcgatctatcgaaaattgctatttcagagatgaggttcggtagtctaggttcacaatgaaccgtaatatatctaggaggtggatatttctgaagcaatagctgattatttatttcttcttccaatctattggtactaacaacgacaccgactaatgtttccggagatagatttccaaagatacacacattaggatacagactgttataatcaaagattaatacattattactaaacattttttgttttggagcaaataccttaccgccttcataaggaaacttttgttttgtttctgatctaactaagatagttttagtttccaacaatagctttaacagtggacccttgatgactgtactcgctctatattcgaataccatggattgaggaagcacatatgttgacgcacccgcgtctgtttttgtttctactccataatactcccacaaatactgacacaaacaagcatcatgaatacagtatctagccatatctaaagctatgtttagattataatccttatacatctgagctaaatcaacgtcatcctttccgaaagataatttatatgtatcattaggtaaagtaggacataatagtacgactttaaatccattttcccaaatatctttacgaattactttacatataatatcctcatcaacagtcacataattacctgtggttaaaacctttgcaaatgcagcggctttgcctttcgcgtctgtagtatcgtcaccgataaacgtcatttctctaactcctctatttaatactttacccatgcaactgaacgcgttcttggatatagaatccaatttgtacgaatccaatttttcagatttttgaatgaatgaatatagatcgaaaaatatagttccattattgttattaacgtgaaacgtagtattggccatgccgcctactcccttatgactagactgatttctctcataaatacagagatgtacagcttcctttttgtccggagatctaaagataatcttctctcctgttaataactctagacgattagtaatatatctcagatcaaagttatgtccgttaaaggtaacgacgtagtcgaacgttagttccaacaattgtttagctattcgtaacaaaactatttcagaacatagaactagttctcgttcgtaatccatttccattagtgactgtatcctcaaacatcctctatcgacggcttcttgtatttcctgttccgttaacatctcttcattaatgagcgtaaacaataatcgtttaccacttaaatcgatataacagtaacttgtatgcgagattgggttaataaatacagaaggaaacttcttatcgaagtgacactctatatctagaaataagtacgatcttgggatatcgaatctaggtatttttttagcgaaacagttacgtggatcgtcacaatgataacatccattgttaatctttgtcaaatattgctcgtccaacgagtaacatccgtctggagatatcccgttagaaatataaaaccaactaatattgagaaattcatccatggtggcattttgtatgctgcgtttctttggctcttctatcaaccacatatctgcgacggagcattttctatctttaatatctagattataacttattgtctcgtcaatgtctatagttctcatctttcccaacggcctcgcattaaatggaggaggagacaatgactgatatatttcgtccgtcactacgtaataaaagtaatgaggaaatcgtataaatacggtctcaccatttcgacatctggatttcagatataaaaatctgttttcaccgtgactttcaaaccaattaatgcaccgaacatccatttatagaatttagaaatatattttcatttaaatgaatcccaaacattggggaagagccgtatggaccattatttttatagtactttcgcaagcgggtttagacggcaacatagaagcgtgtaaacgaaaactatatactatagttagcactcttccatgtcctgcatgtagacggcacgcgactattgctatagaggacaataatgtcatgtctagcgatgatctgaattatatttattattttttcatcagattatttaacaatttggcatctgatcccaaatacgcaatcgatgtgtcaaaggttaaacctttataaacttaacccattataaaacttatgattagtcacgactgaaataaccgcgtgattattttttggtataattctacacggcatggtttctgtgactatgaattcaacccccgttacattagtgaaatctttaacaaacagcaagggttcgtcaaagacataaaactcattgtttacaatcgaaatagaccccctatcacacttaaaataaaaaatatccttatcctttaccaccaaataaaattctgattggtcaatgtgaatgtattcacttaacagttccacaaatttatttattaactccgaggcacatacatcgtcggtattttttatggcaaactttactcttccagcatccgtttctaaaaaaatattaacgagttccatttatatcatccaatattattgaaatgacgttgatggacagatgatacaaataagaaggtacggtacctttgtccaccatctcctccaattcatgctctattttgtcattaactttaatgtatgaaaacagtacgccacatgcttccatgacagtgtgtaacactttggatacaaaatgtttgacattagtataattgtttaagactgtcaatctataatagatagtagctataatatattctatgatggtattgaagaagatgacaatcttggcatattgatcatttaacacagacatggtatcaacagatagcttgaatgaaagagaatcagtaattggaataagcgtcttctcgatggagtgtccgtataccaacatgtctgatattttgatgtattccattaaattatttagttttttctttttattctcgttaaacagcatttctgtcaacggaccccaacatcgttgaccgattaagttttgattgatttttccgtgtaaggcgtatctagtcagatcgtatagcctatccaataatccatcatctgtgcgtagatcacatcgtacactttttaattctctatagaagagcgacagacatctggaacaattacagacagcaatttctttattctctacagatgtaagatacttgaagacattcctatgatgatgcagaattttggataacacggtattgatggtatctgttaccataattcctttgatggctgatagtgtcagagcacaagatttccaatctttgacaatttttagcaccattatctttgttttgatatctatatcagacagcatggtgcgtctgacaacacagggattaagacggaaagatgaaatgattctctcaacatcttcaatggataccttgctattttttctggcattatctatatgtgcgagaatatcctctagagaatcagtatcctttttgatgatagtggatctcaatgacatgggacgtctaaaccttcttattctatcaccagattgcatggtgatttgtcttctttcttttatcataatgtaatctctaaattcatcggcaaattgtctatatctaaaatcataatatgagatgtttacctctacaaatatctgttcgtccaatgttagagtatctacatcagttttgtattccaaattaaacatggcaacggatttaattttatattcctctattaagtcctcgtcgataataacagaatgtagataatcatttaatccatcgtacatggttggaagatgcttgttgacaaaatctttaattgtcttgatgaaggtgggactatatctaacatcttgattaataaaatttataacattgtccataggatactttgtaactagttttatacacatctcttcatcggtaagtttagacagaatatcgtgaacaggtggtatattatattcatcagatatacgaagaacaatgtccaaatctatattgtttaatatattatatagatgtagtgtagctcctacaggaatatctttaactaagtcaatgatttcatcaaccgttagatctattttaaagttaatcatataggcattgatttttaaaaggtatgtagccttgactacattctcattaattaaccattccaagtcactgtgtgtaagaagattatattctatcataagcttgactacatttggtcccgataccattaaagaattcttatgatataaggaaacagcttttaggtactcatctactctacaagaattttggagagccttaacgatatcagtgacgtttattatttcaggaggaaaaaacctaacattgagaatgtcggagttaatagcttccagatacagtgattttggcaatagtccgtgtaatccataatccagtaacacgagctggtgcttgctagacaccttttcaatgtttaatttttttgaaataagctttgataaagccttcctcgcaaattccggatacatgaacatgtcggcgacatgattaagtattgttttttcattatttttatattttctcaacaagttctcaataccccaatagatgatagaatatcacccaatgcgtccatgttgtctatttccaacaggtcgctatatccaccaatagaagttttcccaaaaaagattctaggaacagttctaccaccagtaatttgttcaaaataatcccgcaattcattttcgggtttaaattctttaatatcgacaatttcatacgctcctcttttgaaactaaacttatttagaatatccagtgcatttctacaaaaaggacatgtatacttgacaaaaattgtcactttgttattggccaacctttgttgtacaaattcctcggccattttaatatttaagtgatataaaactatctcgacttatttaactctttagtcgagatatatggacgcagatagctatatgatagccaactacagaaggcaaacgctataaaaaacataattacgacgagcatatttataaatatttttattcagcattacttgatatagtaatattaggcacagtcaaacattcaaccactctcgatacattaactctctcattttctttaacaaattctgcaatatcttcgtaaaaagattcttgaaactttttagaatatctatcgactctagatgaaatagcgttcgtcaacatactatgttttgtatacataaaggcgcccattttaacagtttctagtgacaaaatgctagcgatcctaggatcctttagaatcacatagattgacgattcgtctctcttagtaactctagtaaaataatcatacaatctagtacgcgaaataatattatccttgacttgaggagatctaaacaatctagttttgagaacatcgataagttcatcgggaatgacatacatactatctttaatagaactcttttcatccagttgaatggattcgtccttaaccaactgattaatgagatcttctattttatcattttccagatgatatgtatgtccattaaagttaaattgtgtagcgcttctttttagtctagcagccaatactttaacatcactaatatcgatatacaaaggagatgatttatctatggtattaagaattcgtttttcgacatccgtcaaaaccaattcctttttgcctgtatcatccagttttccatcctttgtaaagaaattattttctactagactattaataagactgataaggattcctccataattgcacaatccaaactttttcacaaaactagactttacgagatctacaggaatgcgtacttcaggtttcttagcttgtgattttttcttttgcggacattttcttgtgaccaactcatctaccatttcattgattttagcagtgaaataagctttcaatgcacgggcactgatactattgaaaacgagttgatcttcaaattccgccatttaagttcaccaaacaacttttaaatacaaatatatcaatagtagtagaataagaactataaaaaaaataataattaaccaataccaaccccaacaaccggtattattagttgatgtgactgttttctcatcacttagaacagatttaacaatttctataaagtctgtcaaatcatcttccggagaccccataaatacaccaaatatagcggcgtacaacttatccatttatacattgaatattggcttttctttatcgctatcttcatcatattcatcatcaatatcaacaagtcccagattacgagccagatcttcttctacattttcagtcattgatacacgttcactatctccagagagtccgataacgttagccaccacttctctatcaatgattagtttcttgagtgcgaatgtaatttttgtttccgttccggatctatagaagacgataggtgtgataattgccttggccaattgtctttctcttttactgagtgattctagttcaccttctatagatctgagaatggatgattctccagccgaaacatattctaccatggctccgtttaatttgttgatgaagatggattcatccttaaatgttttctctgtaatagtttccaccgaaagactatgcaaagaatttggaatgcgttccttgtgcttaatgtttccatagacggcttctagaagttgatacaacataggactagccgcggtaacttttatttttagaaagtatccatcgcttctatcttgtttagatttatttttataaagtttagtctctccttccaacataataaaagtggaagtcatttgactagataaactatcagtaagttttatagagatagacgaacaattagcgtattgagaagcatttagtgtaacgtattcgatacattttgcattagatttactaatcgattttgcatactctataacacccgcacaagtctgtagagaatcgctagatgcagtaggtcttggtgaagtttcaactctcttcttgattaccttactcatgattaaacctaaataattgtactttgtaatataatgatatatattttcactttatctcatttgagaataaaaatgtttttgtttaaccactgcatgatgtacagatttcggaatcgcaaaccaccagtggttttattttatccttgtccaatgtgaattgaatgggagcggatgcgggtttcgtacgtagatagtacattcccgtttttagaccgagactccatccgtaaaaatgcatactcgttagtttggaataactcggatctgctatatggatattcatagattgactttgatcgatgaaggctcccctgtctgcagccatttttatgatcgtcttttgtggaatttcccaaatagttttataaactcgcttaatatcttctggaaggtttgtattctgaatggatccaccatctgccataatcctattcttgatctcatcattccataattttctctcggttaaaactctaaggagatgcggattaactacttgaaattctccagacaatactctccgagtgtaaatattactggtatacggttccaccgactcattatttcccaaaatttgagcagttgatgcagtcggcataggtgccaccaataaactatttctaagaccgtatgttctgattttatcttttagaggttcccaattccaaagatccgacggtacaacattccaaagatcatattgtagaataccgttactggcgtacgatcctacatatgtatcgtatggtccttccttctcagctagttcacaactcgcctctaatgcaccgtaataaatggtttcgaagatcttcttatttagatcttgtgcttccaggctatcaaatggataatttaagagaataaacgcgtccgctaatccttgaacaccaataccgataggtctatgtctcttattagagatttcagcttctggaataggataataattaatatctataattttattgagatttctgacaattactttgaccacatccttcagtttgagaaaatcaaatcgcccatctattacaaacatgttcaaggcaacagatgccagattacaaacggctacctcattagcatccgcatattgtattatctcagtgcaaagattactacacttgatagttcctaaattttgttgattactctttttgttacacgcatccttataaagaatgaatggagtaccagtttcaatctgagattctataatcgctttccagacgactcgagcctttattatagatttgtatctcctttctctttcgtatagtgtatacaatcgttcgaactcgtctccccaaacattgtccaatccaggacattcatccggacacatcaacgaccactctccgtcatccttcactcgtttcataaagagatcaggaatccaaagagctataaatagatctctggttctatgttcctcgtttcctgtattctttttaagatcgaggaacgccataatatcagaatgccacggttccaagtatatggccataactccaggccgtttgtttcctccctgatctatgtatctagcggtgttattataaactctcaacattggaataataccgtttgatataccattggtaccggagatatagcttccactggcacgaatattactaattgatagacctattccccctgccattttagagattaatgcgcatcgttttaacgtgtcatagataccctctatgctatcatcgatcatgttaagtaaaaaacagctagacatttggtgacgactagttcccgcattaaataaggtaggagaagcgtgcgtaaaccatttttcagaaagtagattgtacgtctcaatagctgagtctatatcccattgatgaattcctactgcgacacgcattaacatgtgctgaggtctttcaacgatcttgttgtttattttcaacaagtaggatttttccaaagttttaaaaccaaaatagttgtatgaaaagtctcgttcgtaaataataaccgagttgagtttatccttatatttgttaactatatccatggtgatacttgaaataatcggagaatgtttcccatttttaggattaacatagttgaataaatcctccatcacttcactaaatagtttttttgtttccttgtgtagatttgatacggctattctggcggctagaatggcataatccggatgttgtgtagtacaagtggctgctatttcggctgccagagtgtccaattctaccgttgttactccattatatattccttgaataaccttcatagctattttaataggatctatatgatccgtgtttaagccataacataattttctaatacgagacgtgattttatcaaacatgacattttccttgtatccatttcgtttaatgacaaacatttttgttggtgtaataaaaaaattatttaacttttcattaatagggatttgacgtatgtagcgtacaaaattatcgttcctggtatatagataaagagtcctatatatttgaaaatcgttacggctcgattaaactttaatgattgcatagtgaatatatcattaggatttaactccttgactatcatggcggcgccagaaattaccatcaaaagcattaatacagttatgccgatcgcagttagaacggttatagcatccaccatttatatctaaaaattagatcaaagaatatgtgacaaagtcctagttgtatactgagaattgacgaaacaatgtttcttacatatttttttcttattagtaactgacttaatagtaggaactggaaagctagacttgattattctataagtatagatacccttccagataatgttctctttgataaaagttccagaaaatgtagaattttttaaaaagttatcttttgctattaccaagattgtgtttagacgcttattattaatatgagtaatgaaatccacaccgcctctagatatcgcctttatttccacattagatggtaaatccaatagtgaaactatctttttaggaatgtatggactcgcgtttagaggagtgaacgtcttgggcgtcggaaaggatgattcgtcaaacgaataaacaatttcacaaatggatgttaatgtattagtaggaaatttcttgacgctagtggagttgaagattctaatggatgatgttctacctatttcatccgataacatgttaatttccgacaccaacggttttaatatttcgatgatatacggtagtctctctttcggacttatatagcttattccacaatacgagtcattatatactccaaaaaacaaaataactagtataaaatctgtatcgaatgggaaaaacgaaattatcgacataggtatagaatccggaacattgaacgtattaatacttaattctttttctgtggtaagtaccgataggttattgacattgtatggttttaaatattctataacttgagacttgatagatattagtgatgaattgaaaattatttttatcaccacgtgtgtttcaggatcatcgtcgacgcccgtcaaccaaccgaatggagtaaaataaatatcattaatatatgctctagatattagtatttttatcaatcctttgattatcatcttctcgtaggcgaatgattccatgatcaagagtgatttaagaacatcctccggagtattaatgggcttagtaaacagtccatcgttgcaataataaaagttatccaagttaaaggatattatgcattcgtttaaagatatcacctcatctgacggagacaattttttggtaggttttagagactttgaagctacttgtttaacaaagttattcatcgtcgtctactattctatttaattttgtagttaatttatcacatatcacattaattgactttttggtccatttttccatacgtttatattcttttaatcctgcgttatccgtttccgttatatccagtgatagatcgtgcaggttaaatagaatgctcttaaataatgtcatttttttatccgctaaaaatttaaagaatgtataaacctttttcagagatttgaaactcttaggtggtgtcctagtacacaatatcataaacaaactaataaacattccacattcagattccaacagctgattaacttccacattaatacagcctattttcgctccaaatgtacattcgaaaaatctgaataaaacatcgatgtcacaatttgtattatccaatacagaatgtctgtgattcgtgttaaaaccatcggagaaggaatagaaataaaaattattatagtggtggaattcagttggaatattgcctccggagtcataaaaggatactaaacattgttttttatcataaattacacatttccaatgagacaaataacaaaatccaaacattacaaatctagaggtagaacttttaattttgtctttaagtatatacgataagatatgtttattcataaacgcgtcaaatttttcatgaatcgctaaggagtttaagaatctcatgtcaaattgtcctatataatccacttcggatccataagcaaactgagagactaagttcttaatacttcgattgctcatccaggctcctctctcaggctctattttcatcttgacgacctttggattttcaccagtatgtattcctttacgtgataaatcatcgattttcaaatccatttgtgagaagtctatcgccttagatactttttcccgtagtcgaggtttaaaaaaatacgctaacggtatactagtaggtaactcaaagacatcatatatagaatggtaacgcgtctttaactcgtcggttaactctttcttttgatcgagttcgtcgctactattgggtctgctcaggtgccccgactctactagttccaacatcataccgataggaatacaagacactttgccggcggttgtagatttatcatatttctccactacatatccgttacaatttgttaaaaatttagatacatctatattgctacataatccagctagtgaatatatatgacataataaattggtaaatcctagttctggtattttactaattactaaatctgtatatctttccatttatcatggaaaagaatttaccagatatcttcttttttccaaactgcgttaatgtattctcttacaaatattcacaagatgaattcagtaatatgagtaaaacggaacgtgatagtttctcattggccgtgtttccagttataaaacatagatggcataacgcacacgttgtaaaacataaaggaatatacaaagttagtacagaagcacgtggaaaaaaagtatctcctccatcactaggaaaacccgcacacataaacctaaccacgaaacaatatatatacagtgaacacacaataagctttgaatgttatagttttctaaaatgtataacaaatacagaaatcaattcgttcgatgagtatatattaagaggactattagaagctggtaatagtttacagatattttccaattccgtaggtaaacgaacagatactataggtgtactagggaataagtatccatttagcaaaattccattggcctcattaactcctaaagcacaacgagagatattttcagcgtggatttctcatagacctgtagttttaactggaggaactggagtgggtaagacgtcacaggtacccaagttattgctttggtttaattatttatttggtggattctctactctagataaaatcactgactttcacgaaagaccagtcattctatctcttcctaggatagctttagttagattgcatagcaataccattttaaaatcattgggatttaaggtactagatggatctcctatttctttacggtacggatctataccggaagaattaataaacaaacaaccaaaaaaatatggaattgtattttctacccataagttatctctaacaaaactatttagttatggcactcttattatagacgaagttcatgagcatgatcaaataggagatattattatagcagtagcgagaaagcatcatacgaaaatagattctatgtttttaatgactgccacgttagaggatgacagggaacggctaaaagtatttttacctaatcccgcatttatacatattcctggagatacactgtttaaaattagcgaggtatttattcataataagataaatccatcttccagaatggcatacatagaagaagaaaagagaaatttagttactgctatacagatgtatactcctcctgatggatcatccggtatagtctttgtggcatccgttgcacagtgtcacgaatataaatcatatttagaaaaaagattaccgtatgatatgtatattattcatggtaaggtcttagatatagacgaaatattagaaaaagtgtattcatcacctaatgtatcgataattatttctactccttatttggaatccagcgttactatacgcaatgttacacacatttatgatatgggtagagtttttgtccccgctccttttggaggatcgcaagaatttatttctaaatctatgagagatcaacgaaaaggaagagtaggaagagttaatcctgggacatacgtatatttctatgatctgtcttatatgaagtctatacagcgaatagattcagaatttctacataattatatattgtacgctaataagtttaatctaacactccccgaagatttgtttataatccctacaaatttggatattctatggcgtacaaaggaatatatagactcgttcgatattagtacagaaacatggaataaattattatccaattattatatgaagatgatagagtatgctaaactttatgtactaagtcctattctcgctgaggagttggataactttgagaggacgggagaattaactagtattgtacgagaagccattttatctctaaatttacgaattaagattttaaattttaaacataaagatgatgatacgtatatacacttttgtaaaatattattcggtgtctataacggaacaaacgctactatatattatcatagacctctaacgggatatatgaatatgatttcagatactatatttgttcctgtagataataactaaaaatcaaactctaatgaccacatctttttttagagatgaaaaattttccacatctccttttgtagacacgactaaacattttgcagaaaaaagtttattagtgtttagataatcgtatacttcatcagtgtagatagtaaatgtgaacagataaaaggtattcttgctcaatagattggtaaattccatagaatatattaatcctttcttcttgagatcccacatcatttcaaccagagacgttttatccaatgatttacctcgtactataccacatacaaaactagattttgcagtgacgtcgtacctggtattcctaccaaacaaaattttacttttagttcttttagaaaattctaaggtagaatctctatttgccaatatgtcatctatggaattaccactagcaaaaaatgatagaaatatatattgatacatcgcagctggttttgatctactatactttaaaaacgaatcagattccataattgcctgtatatcatcagctgaaaaactatgttttacacgtattccttcggcatttctttttaatgatatatcttgtttagacaatgataaagttatcatgtccatgagagacgcgtctccgtatcgtataaatatttcattagatgttagacgcttcattaggggtatacttctataaggtttcttaatcagtccatcattggttgcgtcaagaactactatcggatgttgttgggtatctctagtgttacacatggccttactaaagtttgggtaaataactatgatatctctattaattatagatgcatatatttcattcgtcaaggatattagtatcgacttgctatcgtcattaatacgtgtaatgtaatcatataaatcatgcgatagccaaggaaaattcaaatagatgttcatcatataatcgtcgctataattcatattaatactttgacattgactaatttgtaatatagcctcgccacgaagaaagctctcgtattcagtttcatcgataaaggataccgttaaatataactggttgccgatagtctcatagtctattaagtggtaagtttcgtacaaatacagaatccctaaaatattatctaatgttggattaatctttaccataactgtataaaatggagacggagtcataactattttaccgtttgtacttactggaatagatgaaggaataatctccggacatgctggtaaagacccaaatgtctgtttgaagaaatccaatgttccaggtcctaatctcttaacaaaaattacgatattcgatcccgatatcctttgcattctatttaccagcatatcacgaactatattaagattatctatcatgtctattctcccaccgttatataaatcgcctccgctaagaaacgttagtatatccatacaatggaatacttcatttctaaaatagtattcgttttctaattctttaatgtgaaatcgtatactagaaagggaaaaattatctttgagttttccgttagaaaagaaccacgaaactaatgttctgattgcgtccgattccgttgctgaattaatggatttacaccaaaaactcatataacttctagatgtagaagcattcgctaaaaaattagtagaatcaaaggatataagtagatgttccaacaagtgagcaattcccaagatttcatctatatcattctcgaatccgaaattagaaattcccaagtagatatcctttttcatccgatcattgatgaaaatacgaactttattcggtaagacaatcatttactaaggagtaaaataggaagtaatgttcgtatgtcgttatcatcgtataaattaaaggtgtgttttttaccattaagtgacattataattttaccaatattggaattataatataggtgtatttgcgcactcgcgacggttgatgcatcggtaaatatagctgtatctaatgttctagtcggtatttcatcatttcgctgtctaataatagcgttttctctatctgtttccattacagctgcctgaagtttattggtcggataatatgtaaaataataagaaatacatacgaataacaaaaataaaataagatataataaagatgccatttagagatctaattttgttcaacttgtccaaattcctacttacagaagatgaggaatcgttggagatagtgtcttccttatgtagaggatttgaaatatcttatgatgacttgataacttactttccagataggaaataccataaatatatttctaaagtatttgaacatgtagatttatcggaggaattaagtatggaattccatgatacaactttgcgagatttagtttatcttagattgtacaagtattccaagtgtatacggccgtgttataaattaggagataatctaaaaggcatagttgttataaaggacaggaatatttatattagggaagcaaatgatgacttgatagaatatctcctcaaggaatacactcctcagatttatacatattctaatgagcgcgtccccataactggttcaaaattaattctttgtggattttctcaagttacatttatggcgtatacaacgtcgcatataacaacaaataaaaaggtagatgttctcgtttccaaaaaatgtatagatgaactagtcgatccaataaattatcaaatacttcaaaatttatttgataaaggaagcggaacaataaacaaaatactcaggaagatattttattcggtaacaggtggccaaactccataggtagctttttctatttcggattttagaatttccaaattcaccagcgatttatcggttttggtgaaatccaaggatttattaatgtccacaaatgccatttgttttgtctgtggattgtatttgaaaatggaaacgatgtagttagatagatgcgctgcgaagtttcctattagggttccgcgcttcacgtcacccagcatacttgaatcaccatcctttaaaaaaaatgataagatatcaacatggagtatatcatactcggattttaattcttctactgcatcactgacattttcacaaatactacaatacggtttaccgaaaataatcagtacgttcttcatttatgggtatcaaaaacttaaaatcgttactgctggaaaataaatcactgacgatattagatgataatttatacaaagtatacaatggaatatttgtggatacaatgagtatttatatagccgtcgccaattgtgtcagaaacttagaagagttaactacggtattcataaaatacgtaaacggatgggtaaaaaagggagggcatgtaaccctttttatcgatagaggaagtataaaaattaaacaagacgttagagacaagagacgtaaatattctaaattaaccaaggacagaaaaatgctagaattagaaaagtgtacatccgaaatacaaaatgttaccggatttatggaagaagaaataaaggcagaaatgcaattaaaaatcgataaactcacatttcaaatatatttatctgattctgataacataaaaatatcattgaatgagatactaacacatttcaacaataatgagaatgttacattattttattgtgatgaacgagacgcagaattcgttatgtgtctcgaggctaaaacacatttctctaccacaggagaatggccgttgataataagtaccgatcaggatactatgctatttgcatctactgataatcatcctaagatgataaaaaacttaactcaactgtttaaatttgttccctcggcagaggataactatttagcaaaattaacggcgttagtgaatggatgtgatttctttcctggactctatggggcatctataacacccaacaacttaaacaaaatacaattgtttagtgattttacaatcgataatatagtcactagtttggcaattaaaaattattatagaaagactaactctaccgtagacgtgcgtaatattgttacgtttataaacgattacgctaatttagacgatgtctactcgtatgttcctccttgtcaatgcactgttcaagaatttatattttccgcattagatgaaaaatggaacaattttaaatcatcttatttagagaccgttccgttaccctgtcaattaatgtacgcgttagaaccacgcaaggagattgatgtttcagaagttaaaactttatcatcttatatagatttcgaaaatactaaatcagatatcgatgttataaaatctatatcctcgatcttcggatattctaacgaaaactgtaacacgatagtattcggcatctataaggataatttactactgagtataaataattcattttactttaacgatagtctgttaataaccaatactaaaagtgataatataataaatataggttactagattaaaaatggtgttccaactcgtgtgctctacatgcggtaaagatatttctcacgaacgatataaattgattatacgaaaaaaatcattaaaggatgtactcgtcagtgtaaagaacgaatgttgtaggttaaaattatctacacaaatagaacctcaacgtaacttaacagtgcaacctctattggatataaactaatatggatccggttaattttatcaagacatatgcgcctagaggttctattatttttattaattataccatgtcattaacaagtcatttgaatccatcgatagaaaaacatgtgggtatttattatggtacgttattatcggaacacttggtagttgaatctacctatagaaaaggagttcgaatagtcccattggatagtttttttgaaggatatcttagtgcaaaagtatacatgttagagaatattcaagttatgaaaatagcagctgatacgtcattaactttattgggtattccgtatggatttggtcataatagaatgtattgttttaaattggtagctgactgttataaaaatgccggtgttgaaacatcgtctaaacgaatattaggtaaagatatttttctgagccaaaacttcacagacgataatagatggataaagatatatgattctaataatttaacattttggcaaattgattaccttaaagggtgagttaatatgcataactactcctccgttgttttttccctcgttctttttcttaacgttgtttgccatcactctcataatgtaaagatattctaaaatggtaaacttttgcatatcggacgcagaaattggtataaatgttgtaattgtattatttcccgtcaatggactagtcacagctccatcagttttatatcctttagagtatttctcactcgtgtctagcattctagagcattccatgatctgtttatcgttgatattggccggaaagatagattttttattttttattatattactattggcaattgtagatataacttctggtaaatatttttctaccttttcaatttcttctattttcaagccggctatatattctgctatattgttgctagtatcaataccttttctggctaagaagtcatatgtggtattcactatatcagttttaactggtagttccattagcctttccacttctgcagaataatcagaaattggttctttaccagaaaatccagctactataataggctcaccgatgatcattggcaaaatcctatattgtaccagattaatgagagcatatttcatttccaataattctgctagttcttgagacattgatttatttgatgaatctagttggttctctagatactctaccatttctgccgcatacaataacttgttagataaaatcagggttatcaaagtgtttagcgtggctagaatagtgggcttgcatgtattaaagaatgcggtagtatgagtaaaccgttttaacgaattatatagtctccagaaatctgtggcgttacatacatgagccgaatgacatcgaagattgtccaatatttttaatagctgctctttgtccattatttctatatttgactcgcaacaattgtagataccattaatcactgattcctttttcgatgccggacaatagcacaattgtttagctttggactctatgtattcagaattaatagatatatctcttaatacagattgcactatacattttgaaactatgtcaaaaattgtagaacgacgctgttctgcagccatttaactttaaataatttacaaaaatttaaaatgagcatccgtataaaaatcgataaactgcgccaaattgtggcatatttttcagagttcagtgaagaagtgtctataaatgtagactcgacggatgagttaatgtatatttttgccgccttgggcggatctgtaaacatttgggccattatacctctcagtgcatcagtgttctaccgaggagccgaaaacattgtgtttaatcttcctgtgtccaaggtaaaatcgtgtttgtgtagttttcacaatgatgccatcatagatatagaacctgatctggaaaataatctagtaaaactttctagttatcatgtagtaagtgtcgattgtaataaggaactgatgcctattaggacagatactactatttgtctaagtatagatcaaaagaaatcttatgtgtttaattttcacaagtatgaagaaaaatgttgtggtagaaccgtcattcatttagaatggttgttgggctttatcaagtgtattagtcagcatcagcatctggctattatgtttaaagatgacaatattattatgaagactcctggtaatactgatgcattttccagggaatattctatgactgaatgttctcaagaactacaaaagttttctttcaaaatagctatctcgtctctcaacaaactacgaggattcaaaaagagagtcaatgtttttgaaactagaatcgtaatggataatgacgataacattctaggaatgttgttttcggatagagttcaatcctttaagatcaacatctttatggcgtttttagattaatactttcaatgagataaatatgggtggcggagtaagtgttgagctccctaaacgggatccgcctccgggagtacccactgatgagatgttattaaacgtggataaaatgcatgacgtgatagctcccgctaagcttttagaatatgtgcatataggaccactagcaaaagataaagaggataaagtaaagaaaagatatccagagtttagattagtcaacacaggacccggtggtctttcggcattgttaagacaatcgtataatggaaccgcacccaattgctgtcgcacttttaatcgtactcattattggaaaaaggatggaaagatatcagataagtatgaagagggtgcagtattagaatcgtgttggccagacgttcacgacactggaaaatgcgatgttgatttattcgactggtgtcagggggatacgttcgatagaaacatatgccatcagtggatcggttcagcctttaataggagtaatagaactgtagagggtcaacaatcgttaataaatctgtataataagatgcaaacattatgtagtaaagatgctagtgtaccaatatgtgaatcatttttgcatcatttacgcgcacacaatacagaagatagcaaagagatgatcgattatattctaagacaacagtctgcggactttaaacagaaatatatgagatgtagttatcccactagagataagttagaagagtcattaaaatatgcggaacctcgagaatgttgggatccagagtgttcgaatgccaatgttaatttcttgctaacacgtaattataataatttaggactttgcaatattgtacgatgtaatactagcgtgaacaacttacagatggataaaacttcctcattaagattgtcatgtggattaagcaatagtgatagattttctactgttcccgtcaatagagcaaaagtagttcaacataatattaaacactcgttcgacctaaaattgcatttgatcagtttattatctctcttggtaatatggatactaattgtagctatttaaatgggtgccgcagcaagcatacagacgacggtgaatacactcagcgaacgtatctcgtctaaattagaacaagaagcgaatgctagtgctcaaacaaaatgtgatatagaaatcggaaatttttatatccgacaaaaccatggatgtaacctcactgttaaaaatatgtgctctgcggacgcggatgctcagttggatgctgtgttatcagccgctacagaaacatatagtggattaacaccggaacaaaaagcatacgtgccagctatgtttactgctgcgttaaacattcagacgagtgtaaacactgttgttagagattttgaaaattatgtaaaacaaacttgtaattctagcgcggtcgtcgataacaaattaaagatacaaaacgtaatcatagatgaatgttacggagccccaggatctccaacaaatttggaatttattaatacaggatctagcaaaggaaattgtgccattaaggcgttgatgcaattgactactaaggccactactcaaatagcacctagacaagttgctggtacaggagttcagttttatatgattgttatcggtgttataatattggcagcgttgtttatgtactatgccaagcgtatgctgttcacatccaccaatgataaaatcaaacttattttagccaataaggaaaacgtccattggactacttacatggacacattctttagaacttctccgatggttattgctaccacggatatgcaaaactgaaaatatattgataatattttaatagattaacatggaagttatcgctgatcgtctagacgatatagtgaaacaaaatatagcggatgaaaaatttgtagattttgttatacacggtctagagcatcaatgtcctgctatacttcgaccattaattaggttgtttattgatatactattatttgttatagtaatttatatttttacggtacgtctagtaagtagaaattatcaaatgttgttggcgttggtggcgctagtcatcacattaactattttttattactttatactataatagtactagactgacttctaacaaacatctcacctgccataaataaatgcttgatattaaagtcttctatttctaacactattccatctgtggaaaataatactctgacattatcgctaattgacacatcggtgagtgatatgcctataaagtaataatcttctttgggcacatataccagtgtaccaggttctaacaacctatttactggtgctcctgtagcatactttttctttaccttgagaatatccatcgtttgcttggtcaatagcgatatgtgattttttatcaaccactcgaaaaagtaattggagtgttcatatcctctacgggctattgtctcatggccgtgtatgaaatttaagtaacacgactgtggtagatttgttctatagagccggttgccgcaaatagatagaactaccaatatgtctgtacaaatgttaaacattaattgattaacagaaaaaacaatgttcgttctgggaatagaaaccagatcaaaacaaaattcgttagaatatatgccacgtttatacattgaatataaaataactacagtttgaaaaataacagtatcatttaaacatttaacttgcggggttaatttcacaactttactgtttttaaactgttcaaaatatagcatcgatccatgagaaatacgtttagccgcctttaatagaggaaatcccaccgcctttctggatctcaccaacgacgatagttctgaccagcaactcatttcttcatcatccacctgttttaacatataataggcaggagatagatatccgtcattgcaatattccttttcgtaggcacacaatctaatattgataaaatctccattctcttctctgcatttattatcttgtttcggtggctgattaggctgtagtcttggtttaggccttggtctatcgttgttgaatctattttggtcattaaatctttcatttcttcctggtatatttctatcacctcgtttggttggatttttgtctatattatcgtttgtaacatcggtacgggtattcatttatcacaaaaaaaacttctctaaatgagtctactgctagaaaacctcatcgaagaagataccatattttttgcaggaagtatatctgagtatgatgatttacaaatggttattgccggcgcaaaatccaaatttccaagatctatgctttctatttttaatatagtacctagaacgatgtcaaaatatgagttggagttgattcataacgaaaatatcacaggagcaatgtttaccacaatgtataatataagaaacaatttgggtctaggagatgataaactaactattgaagccattgaaaactatttcttggatcctaacaatgaagttatgcctcttattattaataatacggatatgactgccgtcattcctaaaaaaagtggtaggagaaagaataagaacatggttatcttccgtcaaggatcatcacctatcttgtgcattttcgaaactcgtaaaaagattaatatttataaagaaaatatggaatccgcatcgactgagtatacacctatcggagacaacaaggctttgatatctaaatatgcgggaattaatgtcctgaatgtgtattctccttccacatccatgagattgaatgccatttacggattcaccaataaaaataaactagagaaacttagtactaataaggaactagaatcgtatagttctagccctcttcaagaacccattaggttaaatgattttctgggactattggaatgtgttaaaaagaatattcctctaacagatattccgacaaaggattgattactataaatggagaatgttcctaatgtatactttaatcctgtgtttatagagcccacgtttaaacattctttattaagtgtttataaacacagattaatagttttatttgaagtattcgttgtattcattctaatatatgtattttttagatctgaattaaatatgttcttcatgcctaaacgaaaaatacccgatcctattgatagattacgacgtgctaatctagcgtgtgaagacgataaattaatgatctatggattaccatggatgacaactcaaacatctgcgttatcaataaatagtaaaccgatagtgtataaagattgtgcaaagcttttgcgatcaataaatggatcacaaccagtatctcttaacgatgttcttcgcagatgatgattcattttttaagtatttggctagtcaagatgatgaatcttcattatctgatatattgcaaatcactcaatatctagactttctgttattattattgatccaatcaaaaaataaattagaagccgtgggtcattgttatgaatctctttcagaggaatacagacaattgacaaaattcacagactctcaagattttaaaaaactgtttaacaaggtccctattgttacagatggaagggtcaaacttaataaaggatatttgttcgactttgtgattagtttgatgcgattcaaaaaagaatcctctctagctaccaccgcaatagatcctattagatacatagatcctcgtcgcgatatcgcattttctaacgtgatggatatattaaagtcgaataaagtgaacaataattaattctttattgtcatcatgaacggcggacatattcagttgataatcggccccatgttttcaggtaaaagtacagaattaattagacgagttagacgttatcaaatagctcaatataaatgcgtgactataaaatattctaacgataatagatacggaacgggactatggacgcatgataagaataattttgaagcattggaagcaactaaactatgtgatgtcttggaatcaattacagatttctccgtgataggtatcgatgaaggacagttctttccagacattgttgaattctgtgagcgtatggcaaacgaaggaaaaatagttatagtagccgcactcgatgggacatttcaacgtaaaccgtttaataatattttgaatcttattccattatctgaaatggtggtaaaactaactgctgtgtgtatgaaatgctttaaggaggcttccttttctaaacgattgggtgaggaaaccgagatagaaataataggaggtaatgatatgtatcaatcggtgtgtagaaagtgttacatcgactcataatattatattttttatctaaaaaactaaaaataaacattgattaaattttaatataatacttaaaaatggatgttgtgtcgttagataaaccgtttatgtattttgaggaaattgataatgagttagattacgaaccagaaagtgcaaatgaggtcgcaaaaaaactgccgtatcaaggacagttaaaactattactaggagaattattttttcttagtaagttacagcgacacggtatattagatggtgccaccgtagtgtatataggatcggctcctggtacacatatacgttatttgagagatcatttctataatttaggaatgattatcaaatggatgctaattgacggacgccatcatgatcctattctaaatggattgcgtgatgtgactctagtgactcggttcgttgatgaggaatatctacgatccatcaaaaaacaactgcatccttctaagattattttaatttctgatgtaagatccaaacgaggaggaaatgaacctagtacggcggatttactaagtaattacgctctacaaaatgtcatgattagtattttaaaccccgtggcatctagtcttaaatggagatgcccgtttccagatcaatggatcaaggacttttatatcccacacggtaataaaatgttacaaccttttgctccttcatattcagctgaaatgagattattaagtatttataccggtgagaacatgagactgactcgagttaccaaatcagacgctgtaaattatgaaaaaaagatgtactaccttaataagatcgtccgtaacaaagtagttgttaactttgattatcctaatcaggaatatgactattttcacatgtactttatgctgaggaccgtgtactgcaataaaacatttcctactactaaagcaaaggtactatttctacaacaatctatatttcgtttcttaaatattccaacaacatcaactgaaaaagttagtcatgaaccaatacaacgtaaaatatctagcaaaaattctatgtctaaaaacagaaatagcaagagatccgtacgcggtaataaatagaaacgtactactgagatatactaccgatatagagtataatgatttagttactttaataaccgttagacataaaattgattctatgaaaactgtgtttcaggtatttaacgaatcatccataaattatactccggttgatgatgattatggagaaccaatcattataacatcgtatcttcaaaaaggtcataacaagtttcctgtaaattttctatacatagatgtggtaatatctgacttatttcctagctttgttagactagatactacagaaactaatatagttaatagtgtactacaaacaggcgatggtaaaaagactcttcgtcttcccaaaatgttagagacggaaatagttgtcaagattctctatcgccctaatataccattaaaaattgttagatttttccgcaataacatggtaactggagtagagatagccgatagatctgttatttcagtcgctgattaatcaattagtagagatgagataagaacattataataatcaataatatatcttatatcttatatcttatatcttgtttagaaaaatgctaatattaaaatagctaacgctagtaatccaatcggaagccatttgatatctataatagggtatctaatttcctgatttaaatagcggacagctatattctcggtagctactcgtttggaatcacaaacattatttacatctaatttactatctgtaatggaaacgtttcccaatgaaatggtacaatccgatacattgcattttgttatatttttttttaaagaggctggtaacaacgcatcgcttcgtttacatggctcgtaccaacaataatagggtaatcttgtatctattcctatccgtactatgcttttatcaggataaatacatttacatcgtatatcgtctttgttagcatcacagaatgcataaatttgttcgtccgtcatgataaaaatttaaagtgtaaatataactattatttttatagttgtaataaaaagggaaatttgattgtatactttcggttctttaaaagaaactgacttgataaaaatggctgtaatctctaaggttacgtatagtctatatgatcaaaaagagattaatgctacagatattatcattagtcatgttaaaaatgacgacgatatcggtaccgttaaagatggtagactaggtgctatggatggggcattatgtaagacttgtgggaaaacggaattggaatgtttcggtcactggggtaaagtaagtatttataaaactcatatagttaagcctgaatttatttcagaaattattcgtttactgaatcatatatgtattcactgcggattattgcgttcacgagaaccgtattccgacgatattaacctaaaagagttatcgggacacgctcttaggagattaaaggataaaatattatccaagaaaaagtcatgttggaacagcgaatgtatgcaaccgtatcaaaaaattactttttcaaagaaaaaggtttgtttcgtcaacaagttggatgatattaacgttcctaattctctcatctatcaaaagttaatttctattcatgaaaagttttggccattattagaaattcatcaatatccagctaacttattttatacagactactttcccatccctccgctgattattagaccggctattagtttttggatagatagtatacccaaagagaccaatgaattaacttacttattaggtatgatcgttaagaattgtaacttgaatgctgatgaacaggttatccagaaggcggtaatagaatacgatgatattaaaattatttctaataacacttccagtatcaatttatcatatattacatccggcaaaaataatatgattagaagttatattgtcgcccgacgaaaagatcagaccgctagatctgtaattggtcccagtacatctatcaccgttaatgaggtaggaatgcccgcatatattagaaatacacttacagaaaagatatttgttaatgcctttacagtggataaagttaaacaactattagcgtcaaaccaagttaaattttactttaataaacgattaaaccaattaacaagaatacgccaaggaaagtttattaaaaataaaatacatttattgcctggtgattgggtagaagtagctgttcaagaatatacaagtattatttttggaagacagccgtctctacatagatacaacgtcatcgcttcatctatcagagctaccgaaggagatactatcaaaatatctcccggaattgccaactctcaaaatgctgatttcgacggagatgaagaatggatgatattggagcaaaatcctaaagccgtaattgaacaaagtattcttatgtatccgacgacgttactcaaacacgatattcatggagcccccgtttatggatctattcaagatgaaatcgtagcagcgtattcattgtttagaatacaagatctttgtttagatgaagtattgaacatcttggggaaatatggaagaaagttcgatcctaaaggtaaatgtaaattcagcggtaaagatatctatacttacttgataggtgaaaagattaattatccgggtctcttaaaggatggtgaaattattgcaaacgacgtagatagtaattttgttgtggctatgaggcatctgtcattggctggactcttatccgatcataagtcgaacgtggaaggtatcaactttattatcaagtcatcttatgtttttaagagatatctatctatttacggttttggggtgacattcaaagatctgagaccaaattcgacgttcactaataaattggaggccatcaacgtagaaaaaatagaacttatcaaagaagcatacgccaaatatctcaacgatgtaagagacgggaaaatagttccattatctaaagctttagaggcggactatgtggaatccatgttatccaacttgacaaatcttaatatccgagagatagaagaacatatgagacaaacgctgatagatgatccagataataacctcctgaaaatggccaaagcgggttataaagtaaatcccacagaactaatgtatattctaggtacttatggacaacagaggattgatggtgaaccagcagagactcgagtattgggtagagtcttaccttactatcttccagactctaaggatccagaaggaagaggttatattcttaattctttaacaaaaggattaacaggttctcaatattacttttcgatgctggttgccagatctcaatctactgatatcgtctgtgaaacatcacgtaccggaacactggctagaaaaatcattaaaaagatggaggatatggtggtcgacggatacggacaagtagttataggtaatacgctcatcaagtacgccgccaattataccaaaattctaggctcagtatgtaaacctgtagatcttatctatccagatgagtccatgacttggtatttggaaattagtgctctgtggaataaaataaaacagggattcgtttactctcagaaacagaaacttgcaaaaaagacattggcgccgtttaatttcctagtattcgtcaaacccaccactgaggataatgctattaaggttaaggatctgtacgatatgattcataacgtcattgatgatgtgagagagaaatacttctttacggtatctaatatagattttatggagtatatattcttgacgcatcttaatccttctagaattagaattacaaaagaaacggctatcactatctttgaaaagttctatgaaaaactcaattatactctaggtggtggaactcctattggaattatttctgcacaggtattgtctgagaagtttacacaacaagccctgtccagttttcacactactgaaaaaagtggtgccgtcaaacaaaaacttggtttcaacgagtttaataacctgactaatttgagtaagaataagaccgaaattatcactctggtatccgatgatatctctaaacttcaatctgttaagattaatttcgaatttgtatgtttgggagaattaaatccaaacatcactcttcgaaaagaaacagataggtatgtagtagatataatagtcaatagattatacatcaagagagcagaaattaccgaattagtcgtcgaatatatgattgaacgatttatctcctttagcgtcattgtaaaggaatggggtatggagacattcattgaggacgaggataatattagatttactgtctacctaaatttcgttgaaccggaagaattgaatcttagtaagtttatgatggttcttccgggtgccgccaacaagggcaagattagtaaattcaagattcctatctctgactatacgggatatgacgacttcaatcaaacaaaaaagctcaataagatgactgtagaactcatgaatctaaaagaattgggttctttcgatttggaaaacgtcaacgtgtatcctggagtatggaatacatacgatatcttcggtatcgaggccgctcgtgaatacttgtgcgaagccatgttaaacacctatggagaagggttcgattatctgtatcagccttgtgatcttctcgctagtttactatgtgctagttacgaaccagaatcagtgaataaattcaagttcggcgcagctagtactcttaagagagctacgttcggagacaataaagcattgttaaacgcggctcttcataaaaagtcagaacctattaacgataatagtagctgccacttttttagcaaggtccctaatataggaactggatattacaaatactttatcgacttgggtcttctcatgagaatggaaaggaaactatctgataagatatcttctcaaaagatcaaggaaatggaagaaacagaagacttttaattcttatcaataacatatttttctatgatctgtcttttaaacgatggattttccacaaatgcgcctctcaagtccctcatagaatgatacacgtataaaaaatatagcataggcgatgactccttatttttagacattagatatgccaaaatcatagccccgcttctatttactcccgcagcacaatgaaccaacacgggctcgtttcgttgatcacatttagataaaaaggcggtcacgtcgtcaaaatatttactaatatcggtagttgtatcatctaccaacggtatatgaataatattaatattagagttaggcaatgtatatttatccatcgtcaaatttaaaacatatttgaacttaacttcagatgatggtgcatccatagcatttttataatttcccaaatacacattattggttacccttgtcattatagtgggagatttggctttgtgcatatctccagttgaacgtagtagtaagtatttatacaaacttttcttatccatttataacgtacaaatggataaaactactttatcggtaaacgcgtgtaatttagaatacgttagagaaaaggctatagtaggcgtacaagcagccaaaacatcaacacttatattctttgttattatattggcaattagtgcgctattactctggtttcagacgtctgataatccagtctttaatgaattaacgagatatatgcgaattaaaaatacggttaacgattggaaatcattaacggatagcaaaacaaaattagaaagtgatagaggtaaacttctagccgctggtaaggatgatatattcgaattcaaatgtgtggatttcggcgcctattttatagctatgcgattggataagaaaacatatctgccgcaagctattaggcgaggtactggagacgcgtggatggttaaaaaggcggcaaaggtcgatccatctgctcaacaattttgtcagtatttgataaaacacaagtctaataatgttattacttgtggtaatgagatgttaaatgaattaggttatagcggttattttatgtcaccgcattggtgttccgattttagtaatatggaatagtgttagataaatgcggtaacaaatgttcctgtaaggaaccataacagcttagatttaacgttaaagatgagcataaacataataaacaaaattacaatcaaacctataacattaatatcaaacaatccaaaaaatgaaatcagtggagtagtaaacgcgtacataactcctggataacgtttagcagctgccgttcctattctagaccaaaaattcggtttcatgttttcgaagcggtgttctgcaacaagtcggggatcgtgttctacatatttggcggcattatccagtatctgcctattgatcttcatttcgttttcgattctggctatttcaaaataaaatcccgatgatagacctccagactttataatttcatctacgatgttcagcgccgtagtaactctaataatataggctgataagctaacatcataccctcctgtatatgtgaatatggtatgatttttgtccattacaagctcggttttaactttattgcctgtaataatttctctcatctgtaggatatctatttttttgtcatgcattgccttcaagacgggacgaagaaacgtaatatcctcaataacgttatcgttttctacaataactacatattctacctttttattttctaactcggtaaaaaaattagaatcccatagggctaaatgtctagcgatatttcttttcgtttcctctgtacacatagtgttacaaaaccctgaaaagaagtgagtatacttgtcatcatttctaatgtttcctccagtccactgtataaacgcataatccttgtaatgatctggatcatccttgactaccacaacatttcttttttctggcataacttcgttgtcctttacatcatcgaacttctgatcattaatatgctcatgaacattaggaaatgtttctgatggaggtctatcaataactggcacaacaataacaggagttttcaccgccgccatttagttattgaaattaatcatatacaactctttaatacgagttatattttcgtctatccattgtttcacatttacatatttcgacaaaaagatataaaatgcgtattccaatgcttctctgtttaatgaattactaaaatatacaaacacgtcactgtctggcaataaatgatatcttagaatattgtaacaatttattttgtattgcacatgttcgtgatctatgagttcttcttcgaatggcataggatctccgaatctgaaaacgtataaataggagttagaataataatatttgagagtattggtaatatataaactctttagcggtataattagtttttttctctcaatttctatttttagatgtgatggaaaaatgactaattttgtagcattagtatcatgaactctaatcaaaatcttaatatcttcgtcacacgttagctctttgaagtttttaagagatgcatcagttggttctacagatggagtaggtgcaacaattttttgttctacacatgtatgtactggagccattgttttaactataatggtgcttgtatcgaaaaactttaatgcagatagcggaagctcttcgccgcgactttctacatcgtaattgggttctaacgccgatctctgaatggatactagttttctaagttctaatgtgattctctgaaaatgtaaatccaattcctccggcattatagatgtgtatacatcggtaaataaaactatagtatccaacgatcccttctcgcaaattctagtcttaaccaaaaaatcgtatataaccacggagatggcgtatttaagagtggattcttctaccgttttgttcttggatgtcatataggaaactataaagtccgcactactgttaagaatgattactaacgcaactatatagttcaaattaagcattttggaaacataaaataactctgtagacgatacttgactttcgaataagtttgcagacaaacgaagaaagaacagacctctcttaatttcagaagaaaactttttttcgtattcctgacgtctagagtttatatcaataagaaagttaagaattagtcggttaatgttgtatttcattacccaagtttgagatttcataatattatcaaaagacatgataatattaaagataaagcgctgactatgaacgaaatagctatatggttcgctcaaaaatatagtcttgttaaacgtggaaacgataactgtatttttaatcacgtcagcggcatctaaattaaatataggtatatttattccacacactctacaatatgccacaccatcttcataataaataaattcgttagcaaaattattaattttagtgaaatagttagcgtcaactttcatagcttccttcaatctaatttgatgctcacacggtgcgaattctactctaacatcccttttccatgcctcaggttcatcgatctctataatatctagttttttgcgtttcacaaacacaggctcgtctctcgcgatgagatctgtatagtaactatgtaaatgataactagatagaaagatgtagctatatagatgacgatcctttaagagaggtataataactttaccccaatcagatagactgttgttatggtcttcggaaaaagaatttttataaatttttccagtattttccaaatatacgtacttaacatctaaaaaatccttaatgataataggaatggataatccgtctattttataaagaaatacatatcgcacattatacttttttttggaaatgggaataccgatgtgtctacataaatatgcaaagtctaaatattttttagagaatcttagttggtccaaattcttttccaagtacggtaatagatttttcatattgaacggtatcttcttaatctctggttctagttccgcattaaatgatgaaactaagtcactatttttataactaacgattacatcacctctaacatcatcatttaccagaatactgatcttcttttgtcgtaaatacatgtctaatgtgttaaaaaaaagatcatacaagttatacgtcatttcatctgtggtattcttgtcattgaaggataaactcgtactaatctcttctttaacagcctgttcaaatttatatcctatatacgaaaaaatagcaaccagtgtttgatcatccgcgtcaatattctgttctatcgtagtgtataacaatcgtatatcttcttctgtgatagtcgatacgttataaaggttgataacgaaaatatttttatttcgtgaaataaagtcatcgtaggattttggacttatattcgcgtctagtagatatgcttttatttttggaatgatctcaattagaatagtctctttagagtccatttaaagttacaaacaactaggaaattggtttatgatgtataatttttttagtttttatagattctttattctatacttaaaaaatgaaaataaatacaaaggttcttgagggttgtgttaaattgaaagcgagaaataatcataaattatttcattatcgcgatatccgttaagtttgtatcgtaatggcgtggtcaattacaaataaagcggatactagtagcttcacaaagatggctgaaatcagagctcatctaaaaaatagcgctgaaaataaagataaaaacgaggatattttcccggaagatgtaataattccatctactaagcccaaaaccaaacgagccactactcctcgtaaaccagcggctactaaaagatcaaccaaaaaggaggaagtggaagaagaagtagttatagaggaatatcatcaaacaactgaaaaaaattctccatctcctggagtcggcgacattgtagaaagcgtggctgctgtagagctcgatgatagcgacggggatgatgaacctatggtacaagttgaagctggtaaagtaaatcatagtgctagaagcgatctttctgacctaaaggtggctaccgacaatatcgttaaagatcttaagaaaattattactagaatctctgcagtatcgacggttctagaggatgttcaagcagctggtatctctagacaatttacttctatgactaaagctattacaacactatctgatctagtcaccgagggaaaatctaaagttgttcgtaaaaaagttaaaacttgtaagaagtaaatgcgtgcacttttttataaagatggtaaactctttaccgataataattttttaaatcctgtatcagacgataatccagcgtatgaggttttgcaacatgttaaaattcctactcatttaacagatgtagtagtatatgaacaaacgtgggaagaggcattaactagattaatttttgtgggaagcgattcaaaaggacgtagacaatacttttacggaaaaatgcatgtacagaatcgcaacgctaaaagagatcgtatttttgttagagtatataacgttatgaaacgaattaattgttttataaacaaaaatataaagaaatcgtccacagattccaattatcagttggcggtttttatgttaatggaaactatgttttttattagatttggtaaaatgaaatatcttaaggagaatgaaacagtagggttattaacactaaaaaataaacacatagaaataagtcccgatgaaatagttatcaagtttgtaggaaaggacaaagtttcacatgaatttgttgttcataagtctaatagactatataaaccgctattgaaactgacggatgattctagtcccgaagaatttctgttcaacaaactaagtgaacgaaaggtatacgaatgtatcaaacagtttggtattagaatcaaggatctccgaacgtatggagtcaattatacgtttttatataatttttggacaaatgtaaagtccatatctcctcttccgtcaccaaaaaagttaatagcgttaactatcaaacaaactgctgaagtggtaggtcatactccatcaatttcaaaaagagcttacatggcaacgactattttagaaatggtaaaggataaaaattttttagatgtagtatctaaaactacgttcgatgaattcctatctatagtcgtagatcacgttaaatcatctacggatggatgatatagatctttacacaaataattacaagaccgataaatggaaatggataagcgtataaaatctctcgcaatgacagctttcttcggagagctaaacacattagatattatggcattgataatgtctatatttaaacgccatccaaacaataccattttttcagtggataaggatggtcagtttatgattgatttcgaatacgataattataaggcttctcaatatttggatctgaccctcactccgatatctggagatgaatgcaagactcacgcatcgagtatagccgaacaattggcgtgtgcggatattattaaagaggatattagcgaatatatcaaaactactccccgtcttaaacgatttataaaaaaataccgcaatagatcagatactcgcatcagtcgagatacagaaaagcttaaaatagctctagctaaaggcatagattacgaatatataaaagacgcttgttaataagtaaatgaaaaaaaactagtcgtttataataaaacacgatatggatgccaacgtagtatcatcttctactattgcaacgtatatagacgctttagcgaagaatgcttcagaattagaacagaggtctaccgcatacgaaataaataatgaattggaactagtatttattaagccgccattaattactttgacaaatgtagtgaatatctctacgattcaggaatcgtttattcgatttaccgttactaataaggaaggtgttaaaattagaactaagattccattatctaaggtacatggtctagatgtaaaaaatgtacagttagtagatgctatagataacatagtttgggaaaagaaatcattagtgacggaaaatcgtcttcacaaagaatgcttgttgagactatcgacagaggaacgtcatatatttttggattacaagaaatatggatcctctatccgactagaattagtcaatcttattcaagcaaaaacaaaaaactttacgatagactttaagctaaaatattttctaggatccggtgcccagtctaaaagttctttattacacgctattaatcatccaaagtcaaggcctaatacatctctggaaatagaattcacacctagagacaatgaaaaagttccatatgatgaactaataaaggaattgacgactctatcacgtcatatatttatggcttctccagagaatgtaattctttctccgcctattaacgcacctataaagacttttatgttgcctaaacaagatatagtaggtctggatctggaaaatctatacgctgtaactaagactgacggcattcctataactatcagagttacatcaaacgggttgtattgttattttacacatcttggttatattattagatatcctgttaagagaataatagattccgaagtagtagtctttggtgaggcagttaaggataagaactggaccgtatatctcattaagctaatagagcctgtgaatgcaatcaatgatagactagaagaaagtaagtatgttgaatctaaactagtggatatttgtgatcggatagtattcaagtcaaagaaatacgaaggtccgtttactacaactagtgaagtcgtcgatatgttatctacatatttaccaaagcaaccagaaggtgttattctgttctattcaaagggacctaaatctaacattgattttaaaattaaaaaggaaaatactatagaccaaactgcaaatgtagtatttaggtacatgtccagtgaaccaattatctttggagaatcgtctatctttgtagagtataagaaatttagcaacgataaaggctttcctaaagaatatggttctggtaagattgtgttatataacggcgttaattatctaaataatatctattgtttggaatatattaatacacataatgaagtgggtattaagtccgtggttgtacctattaagtttatagcagaattcttagttaatggagaaatacttaaacctagaatcgataaaaccatgaaatatattaactcagaagattattatggaaatcaacataatatcatagtcgaacatttaagagatcaaagcatcaaaataggagatatctttaacgaggataaactatcggatgtgggacatcaatacgccaataatgataaatttagattaaatccagaagttagttattttacgaataaacgaactagaggaccgttgggaattttatcaaactacgtcaagactcttcttatttctatgtattgttccaaaacatttttagacgattccaacaaacgaaaggtattggcgattgattttggaaacggtgctgacctggaaaaatacttttatggagagattgcgttattggtagcgacggatccggatgctgatgctatagctagaggaaatgaaagatacaacaaattaaactctggaattaaaaccaagtactacaaatttgactacattcaggaaactattcgatccgatacatttgtctctagtgtcagagaagtattctattttggaaagtttaatatcatcgactggcagtttgctatccattattcttttcatccgagacattatgctaccgtcatgaataacttatccgaactaactgcttctggaggcaaggtattaatcactaccatggacggagacaaattatcaaaattaacagataaaaagacttttataattcataagaatttacctagtagcgaaaactatatgtctgtagaaaaaatagctgatgatagaatagtggtatataatccatcaacaatgtctactccaatgactgaatacattatcaaaaagaacgatatagtcagagtgtttaacgaatacggatttgttcttgtagataacgttgatttcgctacaattatagaacgaagtaaaaagtttattaatggcgcatctacaatggaagatagaccgtctacaaaaaactttttcgaactaaatagaggagccattaaatgtgaaggtttagatgtcgaagacttacttagttactatgttgtttatgtcttttctaagcggtaaataataatatggtatgggttctgatatccccgttctaaatgcattaaataattccaatagagcgatttttgttcctataggaccttccaactgtggatactctgtattgttaatagatatattaatacttttgtcgggtaacagaggttctacgtcttctaaaaataaaagtttgataacatctggcctgttcataaataaaaacttggcgattctatatatactcttattatcaaatctagccattgtcttatagatgtgagctactgtaggtgtaccatttgattttctttctaatactatatatttctctcgaagaagttcttgcacatcatctgggaataaaatactactgttgagtaaatcagttattttttttatatcgatattgatggacatttttatagttaaggataataagtatcccaaagtcgataacgacgataacgaagtatttatacttttaggaaatcacaatgactttatcagattaaaattaacaaaattaaaggagcatgtatttttttctgaatatattgtgactccagatacatatggatctttatgcgtcgaattaaatgggtctagttttcagcacggtggtagatatatagaggtggaggaatttatagatgctggaagacaagttagatggtgttctacatccaatcatatatctgaagatatacccgaagatatacacactgataaatttgtcatttatgatatatacacttttgacgctttcaagaataaacgattggtattcgtacaggtacctccgtcgttaggagatgatagtcatttgactaatccgttattgtctccgtattatcgtaattcagtagccagacaaatggtcaatgatatgatttttaatcaagattcatttttaaaatatttattagaacatctgattagaagccactatagagtttctaaacatataacaatagttagatacaaggataccgaagaattaaatctaacgagaatatgttataatagagataagtttaaggcgtttgtattcgcttggtttaacggcgtttcggaaaatgaaaaggtactagatacgtataaaaaggtatctaatttgatataatgaattcagtgactgtatcacacgcgccatatactattacttatcacgatgattgggaaccagttatgagtcaattggtagagttttataacgaagtagccagttggctgctacgagacgagacgtcgcctattcctgataagttctttatacagttgaaacaaccgcttagaaataaacgagtatgtgtgtgtggtatagatccgtatccgaaagatggaactggtgtaccgttcgaatcaccaaattttacaaaaaaatcaattaaggagatagcttcatctatatctagattaaccggagtaattgattataaaggttataaccttaatataatagacggggttataccctggaattattacttaagttgtaaattaggagaaacaaaaagtcacgcgatctactgggataagatttccaagttactgctgcagcatataactaaacacgttagtgttctttattgtttgggtaaaacagatttctcgaatatacgggcaaagttagaatccccggtaactaccatagtgggatatcatccagcggctagagaccgccaattcgagaaagatagatcatttgaaattatcaacgttttactggaattagacaacaaggtacctataaattgggctcaagggtttatttattaatgctttagtgaaattttaacttgtgttctaaatggatgcggctattagaggtaatgatgttatctttgtccttaagactataggtgtcccatcagcatgtagacaaaatgaagatccaagattcgtagaagcatttaaatgcgacgagttaaaaagatatattgataataatccagaatgtacactattcgaaagtcttagggatgaggaagcatactctatagtcagaattttcatggatgtagatttagacgcgtgtctagacgaaatagattatttaacggctattcaagattttattatcgaggtgtcaaactgtgtagctagattcgcgtttacagaatgcggtgccattcatgaaaatgtaataaaatccatgagatctaatttttcattgactaagtctacaaatagagataaaacaagttttcatattatctttttagacacgtataccactatggatacattgatagctatgaaacgaacactattagaattaagtagatcatctgaaaatccactaacaagatcgatagacactgccgtatataggagaaaaacaactcttcgggttgtaggtactaggaaaaatccaaattgcgacactattcatgtaatgcaaccaccgcatgataatatagaagattacctattcacttacgtggatatgaacaacaatagttattacttttctctacaacgacgattggaggatttagttcctgataagttatgggaaccagggtttatttcattcgaagacgctataaaaagagtttcaaaaatattcattaattctataataaactttaatgatctcgatgaaaataattttacaacggtaccactggtcatagattacgtaacaccttgtgcattatgtaaaaaacgatcgcataaacatccgcatcaactatcgttggaaaatggtgctattagaatttacaaaactggtaatccacatagttgtaaagttaaaattgttccgttggatggtaataaactgtttaatattgcacaaagaattttagacactaactctgttttattaaccgaacgaggagactatatagtttggattaataattcatggaaatttaacagcgaagaacccttgataacaaaactaattctgtcaataagacatcaactacctaaggaatattcaagcgaattactctgtccgaggaaacgaaagactgtagaagctaacatacgagacatgttagtagattcagtagagaccgatacctatccggataaacttccgtttaaaaatggtgtattggacctggtagacggaatgttttactctggagatgatgctaaaaaatatacgtgtactgtatcaaccggatttaaatttgacgatacaaagttcgtcgaagacagtccagaaatggaagagttaatgaatatcattaacgatatccaaccattaacggatgaaaataagaaaaatagagagctatatgaaaaaacattatctagttgtttatgtggtgctaccaaaggatgtttaacattcttttttggagaaactgcaactggaaagtcgacaaccaaacgtttgttaaagtctgctatcggtgacctgtttgttgagacgggtcaaacaattttaacagatgtattggataaaggacctaatccatttatcgctaacatgcatttgaaaagatctgtattctgtagcgaactacctgattttgcctgtagtggatcaaagaaaattagatctgataatattaaaaagttgacagaaccttgtgtcattggaagaccgtgtttctccaataaaattaataatagaaaccatgctacaatcattatcgatactaattacaaacctgtctttgataggatagataacgcattaatgagaagaattgccgtcgtgcgattcagaacacacttttctcaaccttctggtagagaggctgctgaaaataatgacgcgtacgataaagtcaaactattagacgaggggttagatggtaaaatacaaaataatagatatagatttgcatttctatacttgttggtgaaatggtacaaaaaatatcatgttcctattatgaaactatatcctacacccgaagagattcctgactttgcattctatctcaaaataggtactctgttagtatctagctctgtaaagcatattccattaatgacggacctctccaaaaagggatatatattgtacgataatgtggttactcttccgttgactactttccaacagaaaatatccaagtattttaattctagactatttggacacgatatagagagcttcatcaatagacataagaaatttgccaatgttagtgatgaatatctgcaatatatattcatagaggatatttcatctccgtaaatatatgctcatatatttatagaagatatcacatatctaaatgaataccggaattatagatttatttgataatcatgttgatagtataccaactatattacctcatcagttagctactctagattatctagttagaactatcatagatgagaacagaagcgtgttattgttccatattatgggatcaggtaaaacaataatcgctttgttgttcgccttggtagcttccagatttaaaaaggtttacattctagtgccgaacatcaacatcttaaaaattttcaattataatatgggtgtagctatgaacttgtttaatgacgaattcatagctgagaatatctttattcattccacaacaagtttttattctcttaattataacgataacgtcattaattataacggattatctcgctacaataactctatttttatcgttgatgaggcacataatatctttgggaataatactggagaacttatgaccgtgataaaaaataaaaacaagattccttttctactattgtctggatctcccattactaacacacctaatactctgggtcatattatagatttaatgtccgaagagacgatagattttggtgaaattattagtcgtggtaagaaagtaattcagacacttcttaacgaacgaggtgtgaatgtacttaaggatttgcttaaaggaagaatatcatattacgaaatgcctgataaagatctaccaacgataagatatcacggacgtaagtttctagatactagagtagtatattgtcacatgtctaaacttcaagagagagattatatgattactagacgacagctatgttatcatgaaatgtttgataaaaatatgtataacgtgtcaatggcagtattgggacaacttaatctgatgaataatttagatactttatttcaggaacaggataaggaattgtacccaaatctgaaaataaataatggcgtgttatacggagaagaattggtaacgttaaacattagttccaaatttaagtactttatcaatcggatacagacactcaacggaaaacattttatatacttttctaattctacatatggtggattggtaattaaatatatcatgctcagtaatggatattctgaatataatggttctcagggaactaatccacatatgataaacggcaaaccaaaaacatttgctatcgttactagtaaaatgaaatcgtctttagaggatctattagatgtgtataattctcctgaaaacgatgatggtagtcaattgatgtttttgttttcatcaaacattatgtccgaatcctatactctgaaagaggtaaggcatatttggtttatgactatcccagatactttttctcaatacaaccaaattcttggacgatctattagaaaattctcttacgccgatatttctgaaccagttaatgtatatcttttagccgccgtatattccgatttcaatgacgaagtaacgtcattaaacgattacacacaggatgaattaattaatgttttaccatttgacatcaaaaagctgttgtatctaaaatttaagacgaaagaaacgaatagaatatactctattcttcaagagatgtctgaaacgtattctcttccaccacatccatcaattgtaaaagttttattgggagaattggtcagacaatttttttataataattctcgtattaagtataacgactccaagttacttaaaatggttacatcagttataaaaaataaagaagacgctaggaattacatagatgatattgtaaacggtcacttctttgtatcgaataaagtatttgataaatctcttttatacaaatacgaaaacgatattattacagtaccgtttagactttcctacgaaccatttgtttggggagttaactttcgtaaagaatataacgtggtatcttctccataaaactgatgagatatataaagaaataaatgtcgagctttgttaccaatggatacctttccgttacattggaacctcatgagctgacgttagacataaaaactaatattaggaatgccgtatataagacgtatctccatagagaaattagtggtaaaatggccaagaaaatagaaattcgtgaagacgtggaattacctctcggcgaaatagttaataattctgtagttataaacgttccgtgtgtaataacctacgcgtattatcacgttggggatatagtcagaggaacattaaacatcgaagatgaatcaaatgtaactattcaatgtggagatttaatctgtaaactaagtagagattcgggtactgtatcatttagcgattcaaagtactgcttttttcgaaatggtaatgcgtatgacaatggcagcgaagtcactgccgttctaatggaggctcaacaaggtatcgaatctagttttgtttttctcgcgaatatcgtcgactcataagaaagagaatagcggtaagtataaacacgaatactatggcaataattgcgaatgttttattcccttcgatatatttttgataatatgaaaaacatgtctctctcaaatcggacaaccatctcataaaatagttctcgcgcgctggagaggtagttgctgctcgtataatctccccagaataatatacttgcgtgtcgtcgttcaatttatacggatttctatagttctctgttatataatacggttttccatcatgattagacgacgacaatagtgttctaaatttagatagttgatcagaatgaatgtttattggcgttggaaaaattatccatacagcgtctgcagagtgcttgatagttgttcctagatatgtaaaataatccaacgtactaggtagcaaattgtctagataaaatactgaatcaaacggcgcagacgtattagcggatctaatggaatccaattgattgactatcttttgaaaatatacatttttatgatccgatacttgtaagaatatagaaataatgataagtccatcatcgtgtttttttgcctcttcataagaactatattttttcttattccaatgaacaagattaatctctccagagtatttgtacacatctatcaagtgattggatccataatcgtcttcctttccccaatatatatgtagtgatgataacacatattcattggggagaaaccctccacttatatatcctcctttaaaattaatccttactagttttccagtgttctggatagtggttggtttcgactcattataatgtatgtctaacggcttcaatcgcgcgttagaaattgcttttttagtttctatattaataggagatagttgttgcggcatagtaaaaatgaaatgataactgtttaaaaatagctcttagtatgggaattacaatggatgaggaagtgatatttgaaactcctagagaattaatatctattaaacgaataaaagatattccaagatcaaaagacacgcatgtgtttgctgcgtgtataacaagtgacggatatccgttaataggagctagaagaacttcattcgcgttccaggcgatattatctcaacaaaattcagattctatctttagagtatccactaaactattacggtttatgtactacaatgaactaagagaaatctttagacggttgagaaaaggttctatcaacaatatcgatcctcacttcgaagagttaatattattgggtggtaaactagataaaaaggaatctattaaagattgtttaagaagagaattaaaagaggaaagtgatgaacgtataacagtaaaagaatttggaaatgtaattctaaaacttacaacacgggataaattatttaataaagtatatataagttattgcatggcgtgttttattaatcaatcgttggaggatttatcgcatactagtatttacaatgtagaaattagaaagattaaatcattaaatgattgtattaacgacgataaatacgaatatctgtcttatatttataatatgctagttaatagtaaatgaacttttacagatctagtataattagtcagattattaagtataatagacgactagctaagtctattatttgcgaggatgactctcaaattattacactcacggcattcgttaaccaatgcctatggtgtcataaacgagtatccgtgtccgctattttattaactactgataacaaaatattagtatgtaacagacgagatagttttctctattctgaaataattagaactagaaacatgtttagaaagaaacgattatttctgaattattccaattatttgtccaaacaggaaagaagtatactatcgtcatttttttctctatatccagctactgctgataatgatagaatagatgctatttatccgggtggcatacccaaaaggggtgagaatgttccagagtgtttatccagggaaattaaagaagaagttaatatagacaattcttttgtattcatagacactcggttttttattcatggcatcatagaagataccattattaataaattttttgaggtaatcttctttgtcggaagaatatctctaacgagtgatcaaatcattgatacatttaaaagtaatcatgaaatcaaggatctaatatttttagatccgaattcaggtaatggactccaatacgaaattgcaaaatatgctctagatactgcaaaactcaaatgttatggccatagaggatgttattacgaatcattaaaaaaattaactgaggatgattgattagaaaatataaattaatttaccatcgtgtatttttataacgggattgtccggcatatcatgtagatagttaccgtctacatcgtatactcgaccatctacgcctttaaatcctctatttattgacattaatctattagaattggaataccaaatattagtaccctcaattagtttattggtaatattttttttagacgatagatcgatggctcttgaaaccaaggttttccaaccggactcattgtcgatcggtgagaagtctttttcattagcatgaatccattctaatgatgtatgtttaaacactctaaacaattggacaaattcttttgatttgctttgaatgatttcaaataggtcttcgtctacagtaggcataccattagataatctagccattataaagtgcacgtttacatatctacgttctggaggagtaagaacgtgactattgagacgaatggctcttcctactatctgacgaagagacgcctcgttccaagtcatatctagaatgaagatatcattgattgagaagaagctaataccctcgcctccactagaagagaatacgcatgttttaatgcattctccgttagtgtttgattcttggttaaactcagccaccgccttgattctagtatcttttgttctagatgagaactctatattagagataccaaagactttgaaatatagtaataagatttctattcctgactgattaacaaatggttcaaagactagacatttaccatgggatgctaatattcccaaacatacatctataaatttgacgcttttctcttttaattcagtaaatagagagatatcagccgcactagcatcccctttcaatagttctccctttttaaaggtatctaatgcggatttagaaaactctctatttcttaatgaatttttaaaatcattatatagtgttgctatctcttgcgcgtattcgcccggatcacgattttgtctttcaggaaagctatcgaacgtaaacgtagtagccatacgtctcagaattctaaatgatgatatacctgtttttatttcagcgagtttagccttttgataaatttcttcttgctttttcgacatattaacgtatcgcattaatactgttttcttagcgaatgatgcagacccttctacgtcatcaaaaatagaaaactcgttattaactatgtacgaacataggcctcctagtttggagactaattctttctcatcaactagacgtttattctcaaatagcgattggtgttgtaaggatcctggtcgtagtaagttaaccaacatggtgaattcttgcacactattgacgataggtgtagccgataaacaaatcatcttatggttttttaacgcaatggttttagataaaaaattatatactgaacgagtaggacggatcttaccatcttctttgattaatgatttagaaatgaagttatgacattcatcaataatgacgcatattctactcttggaattaatagttttgatattagtaaaaaatttatttctaaaattttgatcatcgtaattaataaaaatacaatccttcgttatctctggagcgtatctgagtatagtgttcatccaaggatcttctatcaaagcctttttcaccaataagataatagcccaattcgtataaatatccttaagatgtttgagaatatatacagtagtcattgttttaccgacacccgtttcatggaacaataaaagagaatgcatactgtctaatcctaagaaaactcttgctacaaaatgttgataatccttgaggcgtactacgtccgaccccatcatttcaacaggcatattagtagttctgcgcaatgcataatcgatataggccgcgtgtgatttactcatttatgagtgataagtaataactatgttttaaaaatcacagcagtagtttaactagtcttctctgatgtttgttttcgatacttttcgaatcagaagtcatactagaataaagcagcgagtgaacgtaatagagagcttcgtatactctattcgaaaactctaagaacttattaatgaattccgtatccactggatcgtttaaaatactaaattgaacactgttcacatccttccaagaagaagacttagtgacggacttaacatgagacataaataaatccaaattttttttacaaacatcactagccaccataatggcgctatctttcaaccagctatcgcttacgcattttagcagtctaacatttttaaagagactacaatatattctcatagtatcgattacacctctaccgaataaagttggaagtttaataatacaatatttttcgtttacaaaatcaaataatggtcgaaacacgtcgaaggttaacatcttataatcgctaatgtatagattgttttcagtgagatgattattagatttaatagcatctcgttcacgtttgaacagtttattgcgtgcgctgaggtcggcaactacggcgtccgctttagtactcctcccataatactttacgctattaatctttaaaatttcatagactttatctagatcgctttctggtaacatgatatcatgtgtaaaaagttttaacatgtcggtcggcattctatttagatcattaactctagaaatctgaagaaagtaattagctccgtattccagactaggtaatgggcttttacctagagacagattaagttctggcaatgtttcataaaatggaagaaggacatgcgttccctcccggatattttttacaatttcatccatttacaactctatagtttgttttcattattattagttattatctcccataatcttggtaatacttaccccttgatcgtaagataccttatacaggtcattacatacaactaccaattgtttttgtacataatagattggatggttgacatccatggtggaataaactactcgaacagatagtttatctttccccctagatacattggccgtaatagttgtcggcctaaagaatatctttggtgtaaagttaaaagttagggttcttgttccattattgctttttgtcagtagttcattataaattctcgagatgggtccgttctctgaatatagaacatcatttccaaatctaacttctagtctagaaataatatcggtcttattcttaaaatctattcccttgatgaagggatcgttaatgaacaaatccttggcctttgattcggctgatctattatctccgttatagacgttacgttgactagtccaaagacttacaggaatagatgtatcgatgatgttgatactatgtgatatgtgagcaaagattgttctcttagtggcatcactatatgttccagtaatggcggaaaactttttagaaatgttatatataaaagaattttttcgtgttccaaacattagcagattagtatgaagataaacactcatattatcaggaacattatcaatttttacatacacatcagcatcttgaatagaaacgataccatcttctggaacctctacgatctcggcagactccggataaccagtcggtgggccatcactaacaataactagatcatccaacaatctactcacatatgcatctatataatctttttcatcttgtgagtaccctggatacgaaataaatttattatccgtatttccataataaggtttagtataaacagagagcgatgttgccgcatgaacttcagttacagtcgccgttggttggtttatttgacctattactctcctaggtttctctataaacgatggtttaatttgtacattcttaaccatatatccaataaagctcaattcaggaacataaacaaattctttgttgaacgtttcaaagtcgaacgaagagtcacgaataacgatatcggatactggattgaaggttaccgttacggtaatttttgaatcggatagtttaagactgctgaatgtatcttccacatcaaacggagttttaatataaacgtatactgtagatggttctttaatagtgtcattaggagttaggccaatagaaatatcattaagttcactagaatatccagagtgtttcaaagcaattgtattattgatacaattattatataattcttcgccctcaatttcccaaataacaccgttacacgaagagatagatacgtgattaatacatttatatccaacatatggtacgtaaccgaatcttcccatacctttaacttctggaagttccaaactcagaaccaaatgattaagcgcagtaatatactgatccctaatttcgaagctagcgatagcctgattgtctggaccatcgtttgtcataactccggatagagaaatatattgcggcatatataaagttggaatttgactatcgactgcgaagacattagaccgtttaatagagtcatccccaccgatcaaagaattaatgatagtattattcattttctatttaaaatggaaaaagcttacaataaactccgtagagaaatatctataatttgtgagttttccttaaagtaacagcttccgtaaacgccgtctttatctcttagtaagtttattgtatttataaccttttccttatcttcatagaatactaaaggcaacaaagaaatttttggttcttctctaagagctacgtgagacttaaccatagaagccaacgaatccctacatattttagaacagaaataccctacttcaccacccttgtatgtctcaatactaataggtctaaaaaccaaatcttgattacaaaaccaacacttatcaattacactatttgtcttaatagacacatctgccatagatttataatactttggtagtatacaagcgagtgcttcttctttagcgggcttaaagactgctttaggtgctgaaataaccacatctggaaggcttactcgcttagccatttaattacggaactatttttttatacttctaatgagcaagtagaaaacctctcatctacaaaaacgtactcgtgtccataatcctctaccatagtaacacgttttttagatctcatatgtgctaaaaagttttcccatactaattggttactattatttttcgtataatttttaacagtttgaggttttagatttttagttacagaagtgatatcgaatattttatccaaaaagaatgagtaattaattgtcttagaaggagtgttttcttggcaaaagaataccaagtgcttaaatatttctactacttcattaatcttttctgtactcagattcagtttctcatcttttacttgattgattatttcaaagactaacttataatcctttttatttattctctcgttagccttaagaaaactagatacaaaatttgcatctacatcatccgtggatatttgatttttttccatgatatccaagagttccgagataatttctccagaacattgatgagacaataatctccgcaatacatttctcaaatgaataagtttattagacacgtggaagtttgactttttttgtacctttgtacatttttgaaataccgactcgcaaaaaatacaatattcatatccttgttcagatactataccgttgtgtctacaaccgctacataatcgtagattcatgttaacactctacgtatctcgtcgtccaatattttatataaaaacattttatttctagacgttgccagaaaatcctgtaatatttttagttttttgggctgtgaataaagtatcgccctaatatggttaccgtcctccgccaatatagtagttaaattatccgcacatgcagaagaacaccgcttaggcggattcagtacaatgttatatttttcgtaccaactcatttaaatatcataatctaaaatagttctgtaatatgtctagcgctaatatattgatcataatcctgtgcataaattaagatacaacaatgtctcgaaatcatcgacatggcttcttccatagttagaagatcgtcgtcaaagttagcaacgtgattcatcaacatttgctgttttgaggcagcaaatactgaaccatcgccattcaaccattcataaaaaccatcgtctgaatccattgataatttcttgtactggtttttgagagctcgcatcaatctagcatttctagctcccggattgaaaacagaaagaggatcgtacatccagggtccattttctgtaaatagaatcgtataatgtcccttcaagaagatatcagacgatccacaatcaaagaattggtctccgagtttgtaacaaactgcggactttaacctatacatgataccgtttagcataatttctggtgatacgtcaatcggagtatcatctattagagatctaaagccggtgtaacattctccaccaaacatattcttattctgacgtcgttctacataaaacatcattgctccattaacgataacaggggaatgaacagcactacccatcacattagttcccaatggatcaatgtgtgtaactccagaacatcttccatatcctatgttaggaggagcgaacaccactcttccactattgccatcgaatgccatagaataaatatccttggaattgatagaaatcggactgtcggatgttgtgatcatcttcataggattaacaacgatgtatggtgccgcctgaagtttcatatcgtaactgatgccgtttataggtctagccacagaaaccaacgtaggtctaaatccaactatagacaaaatagaagccaatatctgttcctcatctgtcataacttgagagcatccagtatgaataatcttcattagatggggatctaccgcatcatcatcgttacaataaaaaattcccattctaatgttcataattgcttttctaatcatggtatgcatgtttgctctctgaatctctgtggaaattagatctgatacacctgtaatcactatcggattatcctccgtaagacgattaaccaacaacatataattataagactttacttttctaaattcataaagttgctggattaggctataggtgtctccatgtacatacgcgttctcgagcgcaggaagtttaataccgaatagtgccatcagaataggatgaatatagtaattagtttctggttttctataaataaaagacaaatcttgtgaactagacatatcggtaaaatgcatggattggaatcgtgtagtcgacagaagaatatgatgattagatggagagtatattttatctaactctttgagttggtcaccgattctaggactagctcgagaatgaataagtactaaaggatgagtacatttcacagaaacactagcattgttcaatgtgctctttacatgggtaaggagttgaaatagctcgtttctatttgttctgacaatatttagtttattcataatgttaagcatatcctgaatagtaaagttagatgtgtcatacttgttagtagttagatatttagcaattgcattcccatcatttctcaatctcgtactccaatcatgtgtagatgctacttcatctatagaaaccatacaatcctttttgataggctgttgagattgattatttcctgcacgtttaggtttggtacgttgatttctagcccctgcggatataaagtcatcgtctacaatttgggacaatgaattgcatacactacaagacaaagatttatcagaagtgtgaatatgatcttcatctaccaaagaaagagtttgattagtataactagattttagtcctgcgttagatgttaaaaaaacatcgctattgaccacggcttccattatttatattcgtagtttttactcgaaagcgtgattttaatatccaatcttattacttttggaatcgttcaaaacctttgactagttgtagaatttgatctattgccctacgcgtatactcccttgcatcatatacgttcgtcaccagatcgtttgtttcggcctgaagttggtgcatatctttttcaacactcgacatgagatccttaagggccatatcgtctagattttgttgagatgctgctcctggatttggattttgttgtgctgttgtacatactgtaccaccagtaggtgtaggagtacatacagtggccacaataggaggttgaggaggtgtaaccgttggagtagtacaagaaatatttccatccgattgttgtgtacatgtagttgttggtaacgtctgagaaggttgggtagatggcggcgtcgtcgttttttgatctttattaaatttagagataatatcctgaacagcattgctcggcgtcaacgctggaaggagtgaactcgccggcgcatcagtatcttcagacagccaatcaaaaagattagacatatcagatgatgtattagtttgttgtcgtggttttggtgtaggagcagtactactaggtagaagaataggagccggtgtagctgttggaaccggctgtggagttatatgaatagttggttgtagcggttggataggctgtctgctggcggccatcatattatctctagctagttgttctcgcaactgtctttgataatacgactcttgagactttagtcctatttcaatcgcttcatcctttttcgtatccggatccttttcttcagaataatagattgacgactttggtgtagaggattctgccagcccctgtgagaacttgttaaagaagtccatttaaggctttaaaattgaattgcgattataagattaaatggcagacacagacgatattatcgactatgaatccgatgatctcactgaatacgaggatgatgaagaagaggaagaagatggagagtcactagaaactagtgatatagatcccaaatcttcttataagattgtagaatcagcatccactcatatagaagatgcgcattccaatcttaaacatatagggaatcatatatctgctcttaaacgacgctatactagacgtataagtctatttgaaatagcgggtataatagcagaaagctataacttgcttcaacgaggaagattacctctagtttcagaattttctgacgaaacgatgaagcaaaatatgctacatgtaattatacaagagatagaggagggttcttgtcctatagtcatcgaaaagaacggagaattgttgtcggtaaacgattttgacaaagatggtctaaaattccatctagactatattatcaaaatttggaaacttcaaaaacgatattagaatttatacgaatatcgttctctaaatgtcacaatcaagtctcgcatgttcagcaatttattgtcgtactttatatcgtgttcattaacgatatcttgcaaaatagtaatgattctatcttccttcgatagatattcttcagagattattgtcttatattctttcttgttatcagatatgaatttgataagactttgaacattattgatacccgtctgtttaattttttctacagatattttagttttggcagattctatcgtatctgtcaatagacatccaacatcgacattcgacgtcaattgtctataaatcaacgtataaattttagaaataacattagcgaattgttgtgcattgatgtcgttattctgaaacagtatgattttaggtagcattttcttaacaaagagaacgtatttattgttactcagttgaacagatgatatatccagattactaacgcatctgattccgtataccaaactttcagaagaaatggtatacaattgtttgtattcattcaatgtctctttttcagaaattagtttagagtcgaatactgcaataattttcaagagatagttttcatcagataagattttatttagtgtagatatgataaaactattgttttgttggagaacttgatacgccgcgttctctgtagtcgacgctctcaaatgggaaacaatctccattatttttttggaatcggatacaatatcttcggtatcttgacgcagtctagtatacatagagttaagagagattagagtttgtacattaagcaacatgtctctaaatgtggctacaaacttttccttttccacatcatctagtttattatataccgatttcacaacggcaccagatttaaggaaccagaatgaaaaactctgataactacaatatttcatcatagttacgattttatcatcttctatagttggtgtgatagcgcatacctttttctccaagactggaaccaacgtcataaaaatgtttaaatcaaaatccatatcaacatctgatgcgctaagaccagtctcgcgttcaagattatctttactaatggtgacgaactcatcgtataaaactctaagtttgtccattatttatttacagatttagttgtttaatttatttgtgctcttccagagttgggatagtatttttctaacgtcggtattatattattaggatctacgttcatatgtatcataatattaatcatccacgttttgataaatctatctttagcttctgaaataacgtatttaaacaaaggagaaaaatatttagctacggcatcagacgcaataacattttttgtaaatgtaacatatttagacgacagatcttcgttaaaaagttttccatctatgtagaatccatcagttgttaacaccattcccgcgtcagattgaataggagtttgaatagtttgttttggaaatagatccttcaataacttatagttgggtgggaaaaaatcgattttatcactagactctttcttttttactatcattacctcatgaactatttcttgaatgagtatatgtattttctttcctatatcggacgcgttcattggaaaatataccatgtcgttaactataagaatatttttatcctcgtttacaaactgaataatatcagatgtagttcgtaaacgaactatatcatcaccagcacaacatctaactatatgatatccactagtttcctttagtcgtttattatcttgttccatattagcagtcattccatcatttaagaaggcgtcaaagataatagggagaaatgacattttggattctgttacaactttaccaaaattaaggatatacggacttactatctttttctcaacgtcaatttgatgaacacacgatgaaaatgtacttcgatgagattgatcatgtagaaaacaacaagggatacaatatttccgcatatcatgaaatatattaagaaatcccaccttattatatttccccaaaggatccatgcacgtaaacattatgccgttatcattaataaagacttctttctcatcggatctgtaaaagttgttactgatttttttcattccaggatctagataattaataatgatgggttttctattcttattctttgtattttggcatatcctagaccagtaaacagtttccactttggtaaaatcagcagacttttgaacgctattaaacatggcattaatggcaataactaaaaatgtaaaatatttttctatgttaggaatatggtttttcactttaatagatatatggtttttggccaaaatgatagatatttttttatccgaggatagtaaaatattattagtcgccgtctctataaaaatgaagctagtctcgatatccaattttattctagaattgataggagtcgccaaatgtaccttatacgttatatctcccttgatgcgttccatttgtgtatctatatcggacacaagatctgtaaatagttttacgttattaatcatcacggtatcgccgtcgctagataatgctaatgtaccatccaagtcccaaatggagagatttaactgttcatcgtttagaataaaatgattaccggtcatattaataaagtgttcatcgtatctagataacaacgacttataattaatgtccaagtcttgaactcgctgaatgatcttttttaacccagttagttttagattggtacgaaatatattgttaaactttgattctacagtaatgtccaaatctagttgtggaaatacttccatcaacattgtttcaaacttgataatattattatctacatcttcgtacgatccaaattccggaatagatgtatcgcacgctctgaccacccagataaccaaaaagtcacacgctccaggatatacattgtataaaaagctatcgttttttagtagtgtttttttctgagtatatacgaagggattaaaaatagtattatcaacgtaactatattccaaattattcttatgagaatagataataatatcgtccttaatatctaacaaatttcctaaatatccctttaattgagtcattcgaagcgtcaatagaatatgtctcttaactatttccggctgttgtatatttaaatgacttcgtaaaaaataatatatgggcgacttctcatctatgtaatcatatggagtgagatatagggctcgttctacctcctgccccttacccacctgtaataccaattgcggacttactatatatcgcatatttatatcgtggggtaaagtgaaaatctactaccgatgatgtaagtcttacaatgttcgaaccagtaccagatcttaatttggaggcctccgtagaactaggggaggtaaatatagatcaaacaacacctatgataaaggagaatagcggttttatatcccgcagtagacgtctattcgcccatagatctaaggatgatgagagaaaactagcactacgattctttttacaaagactttattttttagatcatagagagattcattatttgttcagatgcgttgacgctgtaaaagacgtcactattaccaaaaaaaataacattatcgtggcgccttatatagcacttttaactatcgcatcaaaaggatgcaaacttacagaaacaatgattgaagcattctttccagaactatataatgaacatagtaagaaatttaaattcaactctcaagtatccatcatccaagaaaaactcggataccagtttggaaactatcacgtttatgattttgaaccgtattactctacagtagctctggctattcgagatgaacattcatctggcatttttaatatccgtcaagagagttatctggtaagttcattatctgaaataacatatagattttatctaattaatctaaaatctgatcttgttcaatggagtgctagtacgggcgctgtaattaatcaaatggtaaatactgtattgattacagtgtatgaaaagttacaactggtcatagaaaatgattcacaatttacatgttcattggctgtggaatcagaacttccaataaaattacttaaagatagaaatgaattatttacaaaattcattaacgagttaaaaaagaccagttcattcaagataagcaaacgcgataaggatacgctattaaaatattttacttaggactggagttagaatttatagacgactcatttcgtttatcattattactaccatcattattagtattcttcttgtcatcttgttcagaaatatacagcaatgctatacctaatactaaatacattatcatgctcgcaatggctctaacaacaacgaaccaaaatgaatttggtcgtagcttttgttcacaaaaatacataaagaaatgtctacataaatctatggcgccattggctacttgaaatagcgccagtcctcctacagattttaatatagctgtataacatgacatttattcatcatcaaaagagacagagtcaccatctgtcatatttagattttttttcatgtgttcaaagtatcctctactcatttcattataatagtttatcatacttagaattttaggacggatcaatgagtaagacttgactagatcgtcagtagtaatttgtgcatcgtctattctgcatccgcttcgtcgaataatgtatagcatcgctttgagattctccatagctatcaagtctttatacaatgacatggaaatatctgtgaatactttatacttctccaacatcgatgccttaacatcatcgcctactttagcattgaaaatacgttctattgtgtagatggatgtagcaagatttttaaacaacaatgccattttacacgatgattgcctcaagtctccaatcgtttgtttagaacgattagctacagagttcaacgcttggctgactagcatattattatctttagaaattgtattcttcaatgaggcgtttatcatatctgtgatttcgttagtcatattacagtctgactgggttgtaatgttatccaacatatcacctatggatacggtacacgtaccagcatttgtaataatcctatctaagatgttgtatggcattgcgcagaaaatatcttctcctgtaatatctccactctcgataaatctactcagattattcttaaatgccttattctctggagaaaagatatcagtgtccatcatttcattaatagtatacgcagaaaagataccacgagtatcaattctatccaagatacttatcggttccgagtcacagataatggtttcctctccttcgggagatcctgcatagaaatatctaggacaatagtttctatactgtctgtaactctgataatctctaaagtcactaactgataccatgaaattgagaagatcaaacgctgaagtaattaatttttctgcctcgtttttactacaactagttttcatcaatgtagtgacgatgtattgtttagttactcttggtctaatactgatgatagagatattattacttcccataatggatcttctagtagtcaccttaaagcccattgatgcaaatagcagatagataaagtcttggtatgactcctttctaatatagtacggactacctttgtcacccaactttatacccacataagccataacaacctctttaatagccgtttcatgaggtttatcagccatgagcctgagtagttggaagaatctcatgaatcccgtctcagaaagtcctatatgcatgatagatttatctttcctgggaaactctcgtatagtcatagatgaaatactcttcaaagtttctgaaataagattagtaacagtcttacctccgactactctaggtaacaaacaaactctaataggtgttttctctgcggagataatatcagaaaggatagagcaataagtagtattattgtgattataaagaccgaatacataacaggtagaatttataaacatcatgtcctgaaggtttttagacttgtattcctcgtaatccataccgtcccaaaacatggatttggtaactttgatagccgtagatctttgttccttcgccaacaggttaaagaaattaataaagaatttgttgtttctatttatgtccacaaattgcacgtttggaagcgccacggttacattcactgcagcattttgaggatcgcgagtatgaagtacgatgttattgtttactggtatatctggaaagaaatctaccagtctaggaataagagattgatatcgcatagaaatacaaaagttcataatctcatcatcgaagagcattttgttaccattgtaataaatatccactctgtcatatgtataaatgaagtactgttcaaacatgatgagatgtttatatgttggcatagtagtgagatcgacgtttggtaatggcaatgtattaagattaactccataatgtctagcagcatctgcgatgttataagtgttgtcaaagcggggtcgatcttgtgctgttatatattgtctaacacctataagattatcaaaatcttgtctgcttaatacaccgttaacaatttttgccttgaattcttttattggtgcattaataacatccttatagaggatgttaaacaaataagtattatcaaagttaagatctgggtatttcttttctgctagaacatccattgagtcggagccatctggtttaatataaccaccgataaatctagctctgtattctgtatccgtcaatctaatattaagaaggtgttgagtgaaaggtggaagatcgtaaaagctgtgagtattaatgataggattagtttccgaactaatgttaattggggtattaataatatctatatttccagcgttaagtgtaacattaaacagttttaattcacgtgacgtggtatcaattaaataattaatgcccaatttggatatagcagcctgaagctcatcttgtttagttacggatcctaatgagttattaagcaatatatcgaacggatgaacgaaggttgttttgagtttgtcgcatactttgtaatctagacatagatgcggaagaacggtagaaactatacgaaataaatattcagagtcctctaattgatcaagagtaactattgacttaataggcatcatttatttagtattaaatgacgaccgtaccagtgacggatatacaaaacgatttaattacagagttttcagaagataattatccatctaacaaaaattatgaaataactcttcgtcaaatgtctattctaactcacgttaacaacgtggtagatagagaacataatgccgccgtagtgtcatctccagaggaaatatcctcacaacttaatgaagatctatttccagatgatgattctccggccactattatcgaaagagtacaacctcatactactattattgacgatactccacctcctacgtttcgtagagagttattgatatcggaacaacgtcaacaacgagaaaaaagatttaatattacagtatcgaaaaatgctgaagcaataatggaatctagatctatgatatcttctatgccaacacaaacaccatccttgggagtagtttatgataaagataaaagaattcagatgttggaggatgaagtggttaatcttagaaatcaacgatctaatacaaaatcatctgataatttagataattttaccagaatactatttggtaagactccgtataaatcaacagaagttaataagcgtatagccatcgttaattatgcaaatttgaacgggtctcccttatcagtcgaggacttggatgtttgttcagaggatgaaatagatagaatctataaaacgattaaacaatatcacgaaagtagaaaacgaaaaattatcgtcactaacgtgattattattgtcataaacattatcgagcaagcattgctaaaactcggatttgaagaaatcaaaggactgagtaccgatatcacttcagaaattatcgatgtggagatcggagatgactgcgatgctgtagcatctaaactaggaatcggtaacagtccggttcttaatattgtattgtttatactcaagatattcgttaaacgaattaaaattatttaatttaatacattcccatatccagacaacaatcgtctggattaatctgttcctgtcgtctcataccggacgacatattaatctttttattagtaggcatctttttagatggtttctttttcccagcattaactgagtcgatacctagaagatcgtgattgatctctccgaccattccacgaacttctaattggccgtctctgacggtaccataaactattttaccagcattagtaacagcttggacaatctgaccatccatcgcattgtacgatgtagtagtaactgttgttctacgtctaggagcaccagaagtatttttggagcccttggaggttgatgtagaagaagacgaggattttgattttggtttacatgtaatacattttgaactctttgattttgtatcacatgcgccggcagtcacatctgtttgagaattaagattattgttgcctcctttgacggctgcatctccaccgatttgcgctagtagatttttaagctgtggtgtaatcttattaactgtttcgatataatcatcgtaactgcttctaacggctaaattttttttatccgccatttagaagctaaaaatatttttatttatacagaagatttaactagattatacaatgaactaatatgatccttttccagattatttacaaacttggtattttttggttctggaggaggcgaatttaaattcggacttggattcggattttgtgagttcttgatcttattatacatcgagtataggatggcgacggtaactgctacgcaaataccgatcaacaaaagaataccaatcatttattgacaataacttcactattgatcaagtatgcaatatatcatcttttcactaaataagtagtaataatgattcaacaatgtcgagatatatggacgataataatttagttcatggaaatatcgctatgattggtatgaatgactccgctaactctgtggggtgcgcagtgctttccccacatagaataaattagcattccgactgtgataataataccaagtataaacgccataatactcaatactttccatgtacgagtgggactggtagacttactaaagtcaataaaggcgaagatacacgaaagaatcaaaagaatgattccagcgattagcacgccggaaaaataatttccaatcataagcatcatgtccatttaactaataaaaattttaaatcgccgaatgaacaaagtggaatataaaccatataaaaacaatagtttgtactgcaaaaataatatctatttttgttttcgaagatatggtaaaattaaatagtagtacacagcatgttataactaacagcagcaacggctcgtaattacttatcatttactagacgaaaaggtggtgggatattttcttgctcaaataatacgaatatatcacccatccattttatgcgatgtttatatactctaatctttaatagatctatagacgacgggtttaccaacaatatagattttatcgattcatctaatttaaacccttccttaaacgtgaatgatctattatctggcataacgatgactctacctgatgaatcggacaatgtactgggccatgtagaataaattatcaacgaattatcgtctacgaacatttatatcatttgttttaattttaggacgcgaataaatagatataaaatagaaaataacagatattacaaccaatgttatggccgcgcccaaccaggtaggcagttttattttatcttttactacaggttctcctggatgatgtacgtcaccaacggcggacgtagttctagtacaattagacgtaagttctgcttgggaattttttaacgctaaagagttaacgttaatcgtgcacccaacgtatttacatctagttctttgaacatcttgattataatataaccattttctatctctagattcgtcggtgcactcatgtaaccaacataccctaggtcctaaatatttatctccggaattagattttggataattcgcgcaccaacaatttctatttcctttatgatcgttacaaaagacgtataatgccgtatccccaaaagtaaaataatcaggacgaataattctaataaactcagaacaatatctcgcatccatatgtttggagcaaatatcggaataagtagacatagccggtttccgttttgcacgtaaccattctaaacaattggggtttccaggatcgtttctacaaaatccagtcatgaaatcgtcacaatgttctgtcttgtaattattattaaatatttttggacagtgtttggtatttgtcttagaacaacattttgctacgctatcactatcgcccaggagataatccttttttataaaatgacatcgttgcccggatgctatataatcagtagcgtgttttaaatccttaatatattcaggagttacctcgttctgataatagattaatgatccaggacgaaatttgaaagaactacatggttctccatgaattaatacatattgtttagcaaattcaggaactataaaactactacaatgatctatcgacataccatctatcaaacaaaatttgggtttaatttctcccggagatgtttcataatagtacgtataactttcttctgcaaacttaacagctctattatattcaggataattaaaacctaattccatatatttgtctcgtatatctgctattcctggtgctattttgattctattaagagtaacagctgcccccattcttaataatcgtcagtatttaaactgttaaatgttggtatatcaacatctaccttatttcccgcagtataaggtttgttgcaggtatactgttcaggaatggttacatttatacttcttctatagtcctgtctttcgatgttcatcacatatgcaaagaacagaataaacaaaataatgtaagaaataatattaaatatctgtgaattcgtaaatacattgattgccataataattacagcagctacaatacacacaatagacattcccacagtgttgccattacctccacgatacatttgagttactaagcaataggtaataactaagctagtaagaggcaatagaaaagatgagataaatatcatcaatatagagattagaggagggctatatagagccaagacgaacaaaatcaaaccgagtaacgttctaacatcattatttttgaagattcccaaataatcattcattcctccataatcgttttgcatcatacctccatctttaggcataaacgattgctgctgttcctctgtaaataaatctttatcaagcactccagcacccgcagagaagtcgtcaagcatattgtaatatcttaaataactcatttatatattaaaaaatgtcactattaaagatggagtataatctttatgccgaactaaaaaaaatgacttgtggtcaacccctaagtctttttaacgaagacggggatttcgtagaagttgaaccgggatcatcctttaagtttctgatacctaagggattttacgcctctccttccgtaaagacgagtctagtattcgagacattaacaacgaccgataataaaatcactagtatcaatccaacaaatgcgccaaagttatatcctcttcaacgcaaagtcgtatctgaagtagtttctaatatgaggaaaatgatcgaatcaaaacgtcctctatacattactcttcacttggcgtgtggatttggtaagactattaccacgtgttatcttatggctacacacggtagaaaaaccgtcatttgcgtacccaataaaatgttaatacatcaatggaagacacaggtagaggcagtcggattggaacataagatatccatagatggagtaagtagtctattaaaggaactaaagactcaaagtccggatgtattaatagtagtcagtagacatctgacaaacgatgccttttgtaaatatatcaataagcattatgatttgttcatcttggatgaatcacatacgtataatctgatgaacaatacagcagttacaagatttttagcgtattatcctccgatgatgtgttattttttaactgctacacctagaccagctaaccgaatttattgtaacagtattattaatattgccaagttatccgatctaaaaaaaactatctatgcggtagatagtttttttgagccatattccacagataatattagacatatgataaaacgattagatggaccatctaataaatatcatatatatactgagaagttattatctgtagacgagcctagaaatcaacttattcttgataccctggtagaagaattcaagtcaggaactattaatcgaattttagttattactaaactacgtgaacatatggtattcttctacaaacgattattagatcttttcggaccagaggttgtatttataggagacgcccaaaatagacgtactccagatatggtcaaatcaatcaaggaactaaatagatttatattcgtatccaccttattttattccggtactggtttagatattcctagtttggattcgttgttcatttgctcggcagtaatcaacaatatgcaaatagagcaattactagggagggtatgtcgagaaacagaactattagataggacggtatatgtatttcctagcacatccatcaaagaaataaagtacatgataggaaatttcatgcaacgaattattagtctgtctgtagataaactaggatttaaacaaaaaagttatcggaaacatcaagaatccgatcccacttctgtatgtacaacatcctccagagaagaacgtgtattaaatagaatatttaactcgcaaaatcgttaagaagtttaagcgacgatccgcatgctgcgcaggccagtgtattacccctcatagtattaatataatccaatgatacttttgtgatgtcggaaatcttaaccaatttagactgacaggcagaacacgtcatgcaatcatcatcgtcatcgataactgtagtcttgggcttctttttgcggctcttcattccggaacgcacattggtgctatccatttaggtagtaaaaaataagtcagaatatgccctatagcacgatcgtgcaaaacctggtatatcgtctctatctttatcacaatatagtgtatcgacatctttattattattgacttcgtttatcttggaacatggaatgggaacatttttgttatcaacggccacctttgccttaattccagatgttgtaaaattataactaaacagtctatcatcgacacaaatgaaattcttgtttagacgtttgtagtttacgtatgcggctcgttcgcgtctcattttttcagatattgcaggtactataatattaaaaataagaatgaaataacataggattaaaaataaagttatcatgacttctagcgctgatttaactaacttaaaagaattacttagtctgtacaaaagtttgagattttcagattctgcggctatagaaaagtataattctttggtagaatggggaacatctacttactggaaaataggcgtgcaaaaggtagctaatgtcgagacgtcaatatctgattattatgatgaggtaaaaaataaaccgtttaatattgatccgggctattacattttcttaccggtatattttgggagcgtctttatttattcgaagggtaaaaatatggtagaacttggatctggaaactcttttcaaataccagatgatatgcgaagtgcgtgtaacaaagtattagacagcgataacggaatagactttctgagatttgttttgttaaacaatagatggataatggaagatgctatatcaaaatatcagtctccagttaatatatttaaactagctagtgagtacggattaaacatacccaaatatttagaaattgaaatagaggaagacacattatttgacgacgagttatactctattatagaacgctcttttgatgataaatttccaaaaatatccatatcgtatattaagttgggagaacttagacggcaagttgtagactttttcaaattctcgttcatgtatattgagtccatcaaggtagatcgtataggagataatatttttattcctagcgttataacaaaatcaggaaaaaagatattagtaaaagatgtagaccatttaatacgatccaaggttagagaacatacatttgtaaaagtaaaaaagaaaaacacattttccattttatacgactatgatggaaacggaacagaaactagaggagaagtaataaaacgaattatagacactataggacgagactattatgttaacggaaagtatttctctaaggttggtagtgcaggcttaaagcaattgactaataaattagatattaatgagtgcgcaactgtcgatgagttagttgatgagattaataaatccggaactgtaaaacgaaaaataaaaaaccaatcagcatttgatttaagcagagaatgtttgggatatccagaagcggattttataacgttagttaataacatgcggttcaaaatagaaaattgtaaggttgtaaatttcaatattgaaaatactaattgtttaaataacccgagtattgaaactatatatagaaactttaaccagttcgtctcaatctttaatgtcgtcaccgatgtcaaaaaaagattattcgagtgaaataatatgcgcctttgatataggtgcaaaaaatcctgccagaactgttttagaagtcaaggataactccgttagggtattggatatatcaaaattagactggagttctgattgggaaaggcgcatagctaaagatttgtcacaatatgaatacactacagttcttctagaacgtcagcctagaaggtcgccgtatgttaaatttatctattttattaaaggctttttatatcatacatcggctgccaaagttatttgcgtctcgcctgtcatgtctggtaattcatatagagatcgaaaaaagagatcggtcgaagcatttcttgattggatggacacattcggattgcgagactccgttccggatagacgcaaattagacgatgtagcggatagtttcaatttggctatgagatacgtattagataaatggaatactaattatacaccttataataggtgtaaatctaggaattacataaaaaaaatgtaataacgttagtaacgccattatggataatctatttacctttctacatgaaatagaagatagatatgccagaactatttttaactttcatctaataagttgcgatgaaataggagatatatatggtcttatgaaagaacgaatttcctcagaggatatgtttgataatatagtgtataataaagatatacatcatgccattaagaaactagtgtattgcgacatccaacttactaaacacattattaatcagaatacgtatccggtatttaacgattcttcacaagtgaaatgttgtcattatttcgatataaactcagataatagcaatattagctctcgtacagtagagatatttgagagggaaaagtcatctcttgtatcatatattaaaactaccaataagaagagaaaggtcaattacggcgaaataaagaaaactgttcatggaggcactaatgcaaattacttttccggtaaaaagtctgatgagtatctgagtactacagttagatccaacattaatcaaccttggatcaaaaccatttctaagagaatgagagtagatatcattaatcactctatagtaacgcgtggaaaaagctctatattacaaactatagaaattatttttactaatagaacatgtgtgaaaatattcaaggattctactatgcacattattctatccaaggacaaggatgaaaaggggtgtatacacatgattgacaaattattctatgtctattataatttatttctgttgttcgaagatatcatccaaaacgagtactttaaagaagtagctaatgttgtaaaccacgtacttacggctacggcattagatgagaaattattcctaattaagaaaatggctgaacacgatgtttatggagttagcaatttcaaaatagggatgtttaacctgacatttattaagtcgttggatcataccgttttcccctctctgttagatgaggatagcaaaataaagttttttaaggggaaaaagctcaatattgtagcattacgatctctggaggattgtataaattacgtgactaaatccgagaatatgatagaaatgatgaaggaaagatcgactattttaaatagcatagatatagaaacggaatcggtagatcgtctaaaagaattgcttctaaaatgaaaaaaaacactgattcagaaatggatcaacgactcggatataagtttttggtgcctgatcctaaagccggagttttttatagaccgttacatttccaatatgtatcgtattctaattttatattgcatcgattgcatgaaatcttgaccgtcaagcggccactcttatcgtttaagaataatacagaacgaattatgatagaaattagcaatgttaaagtgactcctccagattactcacctataatcgcgagtattaaaggtaagagttatgacgcattagccacgttcactgtaaatatctttaaagaggtaatgaccaaagagggtatatccatcactaaaataagtagttatgagggaaaagattctcatttgataaaaattccgctactaataggatacgggaataaaaatccacttgatacagccaagtatcttgttcctaatgtcataggtggagtctttatcaataaacaatctgtcgaaaaagtaggaattaatctagtagaaaagattacaacatggccaaaatttagggttgttaagccaaactcattcactttctcgttttcctccgtatcccctcctaatgtattaccgacaagatatcgccattacaagatatctctggatatatcacaattggaagcgttgaatatatcatcgacaaagacatttataacggtcaatattgttttgctgtctcaatatttatctagagtgagtctagaattcattagacgtagcttatcatacgatatgcctccagaagttgtctatctagtaaacgcgataatagatagtgctaaacgaattactgaatctattactgactttaatattgatacatacattaatgacctggtggaagctgaacacattaaacaaaaatctcagttaacgatcaacgagttcaaatatgaaatgctgcataactttttacctcatatgaactatacacccgatcaactaaagggattttatatgatatctttactaagaaagtttctctactgtatctaccacacttctagatatccagatagagattcgatggtttgtcatcgtatactaacatacggcaaatattttgagacgttggcacatgatgaattagagaattacataggcaacatccgaaacgatatcatgaacaatcacaagaacagaggcacttacgcggtaaacattcatgtactaacaactcctggacttaatcatgcattttctagcttattgagtggaaagttcaaaaagtcagacggtagttatcgaacacatcctcactattcatggatgcagaatatttctattcctaggagtgttggattttatccggatcaagtaaagatttcaaagatgttttctgtcagaaaataccatccaagtcaatatctttacttttgttcatcagacgttccggaaagaggtcctcaggtaggtttagtatctcaattgtctgtcttgagttccattacaaatatactaacgtctgagtatttggatttggaaaagaaaatttgtgagtatatcagatcatattataaagatgatataagttactttgaaacaggatttccaatcactatagaaaatgctctagtcgcatctcttaatccaaatatgatatgtgattttgtaactgactttagacgtagaaaacggatgggattcttcggtaacttggaggtaggtattactttagttagggatcacatgaatgaaattcgcattaatattggagcgggaagattagtcagaccattcttggttgtggataacggagagctcatgatggatgtgtgtccggagttagaaagcagattagacgatatgacattctctgacattcagaaagagtttccacatgtcatcgaaatggtagatatagaacaatttacttttagtaacgtatgtgaatcggttcaaaaatttagaatgatgtcaaaggatgaaagaaagcaatacgatttatgtgactttcctgccgaatttagagatggatatgtggcatcttcattagtgggaatcaatcacaattctggacccagagctattcttggatgtgctcaagctaaacaagctatctcttgtctgagttcggatatacgaaataaaatagacaatggaattcatttgatgtatccagagaggccaatcgtgattagtaaggctttagaaacttcaaagattgcggctaattgcttcggccaacatgttactatagcattaatgtcgtacaaaggtatcaatcaagaggatggaattatcatcaaaaaacaatttattcagagaggcggtctcgatatagttaccgcaaagaaacatcaagtagaaattccgttggaaaactttaataacaaagaaagagataggtctaatgcatattcgaaattagaaagtaatggattagttagactgaatgctttcttggaatccggagacgctatggcacgaaatatctcatcaagaactcttgaagatgattttgctagagataatcagattagcttcgatgtttccgagaaatataccgatatgtacaaatctcgcgttgaacgagtacaagtagaacttactgacaaagttaaggtacgagtattaaccatgaaagaaagaagacccattctaggagacaaatttaccactagaacgagtcaaaagggaacagtcgcgtatgtcgcggatgaaacggaacttccatacgatgaaaatggtatcacaccagatgtcattattaattctacatccatcttctctagaaaaactatatctatgttgatagaggttattttaacagccgcatattctgctaagccgtacaacaataagggagaaaaccgacctgtctgttttcctagtagtaacgaaacatccatcgatacatatatgcaattcgctaaacaatgttatgagcattcaaatccgaaattgtctgatgaagaattatcggataaaatcttttgtgaaaagattctctatgatcctgaaacggataagccttatgcatccaaagtattttttggaccaatttattacttgcgtctgaggcatttaactcaggacaaggcaaccgttagatgtagaggtaaaaagacgaagctcattagacaagcgaatgagggacgaaaacgtggaggaggtattaagtttggagaaatggagagagactgtttaatagcgcatggcgcagccaatactattacagaagttttgaaagattcggaagaagattatcaagatgtgtatgtttgtgaaaattgtggagacatagcagcacaaatcaagggtattaatacatgtcttagatgttcaaaacttaatctctctcctctcttaacaaaaattgataccacgcacgtatctaaagtatttcttactcaaatgaacgccagaggcgtaaaagtcaaattagatttcgaacgaaggcctccttcgttttataaaccattagataaagttgatctcaagccgtcttttctggtgtaatattctagtttggtagtagatacatatcaatatcatcaaattcgagatccgaattataaaatgggcgtggattgttaactatagaatcggacgtctgatattcgaaaatctgtggagtttcaggttttggtggaggtgtaactgctacttgggatactgaagtctgatattcagaaagctgggggatgttctggttcgacatccaccgatggtgtcacatcactaatcggttcggtaacgtctgtggatggaggtgctacttctacagaacctgtagcctcagttgtcaacggagatacatttttaatgcgaggaaatgtataatttggtaatggtttctcatgtggatctgaagaagaggtaagatatctactagaaagataccgatcacgttctagttctcttttgtagaacttaactttttctttctcagcatctagttgatattccaacctcttcacgttactacgttcagatttcaattcacgttcgcatgggttacctccgcagtttttacgagcgatttcacgttcagccttcatgcgtctctgtgatccgtttacgttaaaccataaatacatgggtgatcctataaacatgaatttatttctaattctcagagctatagttaattgaccgtgtaatatttgcttacatgcatacttgatacgctcattaataagatttttatcattgctcgttatctcagaatcgtatatataaggagtaccatcgtgattcttaccagatattatacaaaatactatatataaaatatattgaccaacgttagtaatcatataaatgtttaacgttttaaattttgtattcaatgatccattatcatacgctagcatggtcttatgatattcattctttaaaatataatattgtgttagccattgcattggagctcctaatggagattttctattctcgtccattttaggatatgctttcataaagtccctaataacttcgtgaataatgtttctatgttttctactgatgcatgtatttgcttcgatttttttatcccatgtttcatctatcatagatttaaacgcagtaatgctcgcaacattaacatcttgaaccgttggtacaattccgttccataaatttataatgttcgccatttatataactcattttttgaatatacttttaattaacaaaagagttaagttactcatatggacgccgtccagtctgaacatcaatctttttagccagagatatcatagccgctcttagagtttcagcgtgattttccaacctaaatagaacttcatcgttgcgtttacaacacttttctatttgttcaaactttgttgttacattagtaatctttttttccaaattagttagccgttgtttgagagtttcctcattgtcgtcttcatcggctttaacaattgcttcgcgtttagcctctggctttttatcagcctttgtagaaaaaaattcagttgctggaattgcaagatcgtcatctccggggaaaagagttccgtccatttaaagtacagattttagaaactgacactctgcgttatttatatttggtacaacacatggattataaatattgatgttaataacatcagaaaatgtaaagtctatacattgttgcatcgtgttaaattttctaatggatctagtattattgggtccaacttctgcctgaaatccaaatatggaagcggatacaaaaccgtttcctggataaaccacacatctccacttttgctttacatcagaaattgtgtcgttgacatcttgaactctcctatctaatgccggtgttccacctatagattttgaatattcgaatgctgcatgagtagcattaaattccttaatattgccataattttcatatattgagtaaccctggataaaaagtaaacacaccgcagccgtcgctaccacaataaaaaaaattgatagagagttcatttataatctattagaagctgacaaaatttttttacacgcatcagacaatgctttaataaatagttcaacatctacttttgtcatatcgaaccgatggtatgattctaacctagaattacatccgaaaaagttgactatgttcatagtcattaagtcattaacaaacaacattccagactctggattataagacgatactgtttcgtcacaatcacctaccttaatcatgtgattatgaatattggctattagagcaccttctaagaaatctataatatctttgaaacacgatttaaaatcaaaccacgaatatacttctacgaagaaagttagtttacccataggagagataactataaatggagatctaaatacaaaatccggatctatgatagttttaacattattatattctctattaaatacctccacatctaaaaatgttaattttgaaactatgtcttcgtttattaccgtacctgaactaaacgctataagctctattgtttgagaactctttaaacgatattcttgaaatacatgtaacaaagtttcctttaactcggtcggtttatctaccatagttacagaatttgtatccttatctataatataataatcaaaatcgtataaagttatataattatcgcgttcagattgggatcttttcaaatagactaaaaaccccatttctctagtaagtatcttatgtatatgtttgtaaaatatcttcatggtgggaatatgctctaccgcagttagccattcctcattgacagcggtagatgtattagacaaaactattccaatgtttaacaagggccattttacgagattattaaatccttgtttgataaatgtagccaatgagggttcgagttcaacgacgattgaattctcttcccgcggatgctgcatgatgaacgacgggatgttgttcgattgatttggaattctttttcgactttttgtttatattaaatattttaaaatttatagctgatagcaattcatgtaccacggataatgtagacgcgtattgcgcatcgatatctttattattagataaatttatcaataaatgtgagaagtttgcctcgttaaggtcttccatttaaatattatataaacatttgtgtttgtatcttattcgtcttttatggaatagttttttactagtaaagctgcaattacacactttgtccgtaaaacataaatataaacaccagcttttatcaatcgttccaaaaagtcgacggcggacatttttaacatggcatctattttaaatacacttaggtttttggaaaaaacatcattttataattgtaacgattcaataactaaagaaaagattaagattaaacataagggaatgtcatttgtattttataagccaaagcattctaccgttgttaaatacttgtctggaggaggtatatatcatgatgatttggttgtattggggaaggtaacaattaatgatctaaagatgatgctattttacatggatttatcatatcatggagtgacaagtagtggagtaatttacaaattgggatcgtctatcgatagactttctctaaataggactattgttacaaaagttaataattatgatgatacattttttgacgacgatgattgatcgctattgcacaattttgtttttttactttctaatatagcgtttagattctttttcatgtgcgaatattgatttactaaaatatcgatgtttaacttttgttctatgacgtccttatcggcggtatcggtacatatacgtaattcaccttcacaaaatacggagtcttcgataataatagccaatcgattattggatctagctgtctgtatcatattcaacatgtttaatatatcctttcgtttcccctttacaggcatcgatcgtagcatattttccgcgtctgagatggaaatgttaaaactacaaaaatgcgtaatgttagcccgtcctaatattggtacgtgtctataagtttggcatagtagaataatagacgtgtttaaatgccttccaaagtttaagaattctattagagtattgcattttgatagtttatcgcctacatcatcaaaaataagtaaaaagtgtgctgattttttatgattttgtgcgacagcaatacatttttctatgttacttttagttcgtatcagattatattctagagattcctgactactaacgaaattaatatgatttggccaaatgtatccatcataatctgggttataaacgggtgtaaacaagaatatatgtttatattttttaactagtgtagaaaacagagatagtaaatagatagtttttccagatccagatcctcccgttaaaaccattctaaacggcatttttaataaattttctcttgaaaattgtttttcttggaaacaattcataattatatttacagttactaaattaatttgataataaatcaaaatatggaaaactaaggtcgttagtagggaggagaacaaagaaggcatatcgtgatataaataacatttattatcatgatgacaccagaaaacgacgaagagcagacatctgtgttctccgctactgtttacggagacaaaattcaaggaaagaataaacgcaaacgcgtgattggtctatgtattagaatatctatggttatttcactactatctatgattaccatgtccgcgtttctcatagtgcgcctaaatcaatgcatgtctgctaacgaggctgctattactgacgccgctgttgccgttgctgctgcatcatctactcatagaaaggttgcgtctagcactacgcaatatgatcacaaagaaagctgtaatggtttatattaccagggttcttgttatatattacattcagactaccagttattctcggatgctaaagcaaattgcactgcggaatcatcaacactacccaataaatccgatgtcttgattacctggctcattgattatgttgaggatacatggggatctgatggtaatccaattacaaaaactacatccgattatcaagattctgatgtatcacaagaagttagaaagtatttttgtgttaaaacaatgaactaatatttatttttgtacattaataaatgaaatcgcttaatagacaaactgtaagtatgtttaagaagttgtcggtgccggccgctataatgatgatactctcaaccattattagtggcataggaacatttctgcattacaaagaagaactgatgcctagtgcttgcgccaatggatggatacaatacgataaacattgttatctagataccaacattaaaatgtccacagataatgcggtttatcagtgtcgtaaattacgagctagattgcctagacctgatactagacatctgagagtattgtttagtattttttataaagattattgggtaagtttaaaaaagaccaataataaatggttagatattaataatgataaagatatagatattagtaaattaacaaattttaaacaactaaacagtacgacggatgctgaagcgtgttatatatacaagtctggaaaactggttaaaacagtatgtaaaagtactcaatctgtactatgtgttaaaaaattctacaagtgacaacaaaaaatgaattaataataagtcgttaacgtacgccgccatggacgccgcgtttgttattactccaatgggtgtgttgactataacagatacattgtatgatgatctcgatatttcaatcatggactttataggaccatacattataggtaacataaaaactgtccaaatagatgtacgggatataaaatattccgacatgcaaaaatgctactttagctataagggtaaaatagttcctcaggattctaatgatttggctagattcaacatttatagcatttgtgccgcatacagatcaaaaaataccatcatcatagcatgcgactatgatatcatgttagatatagaagataaacatcagccattttatctattcccatctattgatgtttttaacgctacaatcatagaagcgtataacctgtatacagctggagattatcatctaatcatcaatccttcagataatctgaaaatgaaattgtcgtttaattcttcattctgcatatcagacggcaatggatggattataattgatgggaaatgcaatagtaattttttatcataaaagttgtaaagtaaataataaaacaataaatattgaactagtagtacgtatattgagcaatcagaaatgatgctggtacctcttatcacggtgacagtagttgcgggaacaatattagtatgttatatattatatatttgtaggaaaaagatacgtactgtctataatgacaataaaattatcatgacaaaattaaaaaagataaagagttctaattccagcaaatctagtaaatcaactgatagcgaatcagactgggaggatcactgtagtgctatggaacaaaacaatgacgtagataatatttctaggaatgagatattggacgatgatagcttcgctggtagtttaatatgggataacgaatccaatgttatggcgcctagcacagaacacatttacgatagtgttgctggaagcacgctgctaataaataatgatcgtaatgaacagactatttatcagaacactacagtagtaattaatgaaacggagactgttgaagtacttaatgaagataccaaacagaatcctaactattcatccaatcctttcgtaaattataataaaaccagtatttgtagcaagtcaaatccgtttattacagaacttaacaataaatttagtgagaataatccgtttagacgagcacatagcgatgattatcttaataagcaagaacaagatcatgaacacgatgatatagaatcatcggtcgtatcattggtgtgattagtttcctttttataaaattgaagtaatatttagtattattgctgccgtcacgttgtacaaatggagatattccctgtattcggcatttctaaaattagcaattttattgctaataatgactgtagatattatatagatacagaacatcaaaaaattatatctgatgagatcaatagacagatggatgaaacggtacttcttaccaacatcttaagcgtagaagttgtaaatgacaatgagatgtaccatcttattccccatagactatcgactattatactctgtattagttctgtcggaggatgtgttatctctatagataatgacgtcaatggcaaaaatattctaacctttcccattgatcatgctgtaatcatatccccactgagtaaatgtgtcgtagttagcaagggtcctacaaccatattggttgttaaagcggatatacctagcaaacgattggtaacatcgtttacaaacgacatactgtatgtaaacaatctatcactgattaattatttgccgttgtctgtattcattattagacgagttaccgactatttggatagacacatatgcgatcagatatttgcgaataataagtggtattccattataaccatcgacaataagcagtttcctattccatcaaactgtataggtatgtcctctgccaagtacataaattctagcatcgagcaagatactttaatacatgtttgtaacctcgagcatccattcgacttagtatacaaaaaaatgcagtcgtacaattctgtacctatcaaggaacaaatattgtacggtagaattgataatataaatatgagcattagtatttctgtgtattaatagatttctagtatggggatcattaatcatctctaatctctaaatacctcataaaacgaaaaaaaagctattatcaaatactgtacggaatggattcattctcttctctttttatgaaactctgttgtatatctactgataaaactggaagcaaaaaatctgatagaaagaataagaataagatcaagatcaaggattatatggaacacgattattataaaataacaatagttcctggttcctcttccacgtctactagctcgtggtattatacacatgcctagtaatagtctctttgcgttgacggaaagcagactagaaataacaggctaaaatgttcagacaccataatagttcccaacccagataataacagagtaccatcaacacattcctttaaactcaatcccaaacccaaaaccgttaaaatgtatccggccaattgatagtagataatgaggtgtacagcgcatgataatttacacagtaaccaaaatgaaaatactttagtaattataagaaatatagatggtaacgtcatcatcaacaatccaataatatgccggagagtaaacattgacggataaaacaaaaatgctccgcataactctatcatggcaataacacaaccaaatacttgtaagattcctaaattagtagaaaatacaacggatatcgatgtataagtgatctcgagaaataataagaataaagtaatgcccgtaaagataaacatcaacattgtttggtaatcattaaaccaattagtatgaagttgaactaatttcacagtagattttattccagtgttatcctcgcatgtataagtacctggtaagatatctttatattctataatcaatgagacatcactatccgataacgaatgaagtctagcactagtatgccatttacttaatattgtcgtcttggaagttttattataagttaaaatatcatggttatccaatttccatctaatatactttgtcggattatctatagtacacggaataatgatggtatcattacatgctgtatactctatggtctttgtagttgttataacaaccaacgtatagaggtatatcaacgatattctaactcttgacattttttatttatttaaaatgatacctttgttatttattttattctattttgctaacggtattgaatggcataagtttgaaacgagtgaagaaataatttctacttacttattagacgacgtattatacacgggtgttaatggggcggtatacacattttcaaataataaactaaacaaaactggtttaactaataataattatatcacaacatctataaaagtagaggatgcggataaggatacattagtatgcggaaccaataacggaaatcccaaatgttggaaaatagacggttcagacgacccaaaacatagaggtagaggatacgctccttatcaaaatagcaaagtaacgataatcagttacaacgaatgtgtactatctgacataaacatatcaaaagaaggaattaaacgatggagaagatttgacggaccatgtggttatgatttatacacggcggataacgtaattccaaaagatggtttacgaggagcattcgtcgataaagatggtacttatgacaaagtttacattcttttcactgatactatcggctcaaagagaattgtcaaaattccgtatatagcacaaatgtgcctaaacgacgaaggtggtccatcatcattgtctagtcatagatggtcgacgtttctcaaagtcgaattagaatgtgatatcgacggaagaagttatagacaaattattcattctagaactataaaaacagataatgatacgatactatatgtattcttcgatagtccttattccaagtccgcattatgtacctattctatgaataccattaaacaatctttttctacgtcaaaattggaaggatatacaaagcaattgccgtctccagctcctggtatatgtttaccagctggaaaagttgtttcacataccacgtttgaagtcatagaaaaatataatgtactagatgatattataaagcctttatctaaccaacctatcttcgaaggaccgtctggtgttaaatggttcgatataaaggagaaggaaaatgaacatcgggaatatagaatatacttcataaaagaaaattctatatattcgttcgatacaaaatctaaacaaactcgtagctcgcaagtcgatgcgcgactattttcagtaatggtaacttcgaaaccgttatttatagcagatatagggataggagtaggaatgccacaaatgaaaaaaatacttaaaatgtaatcttaatcgagtacaccacacgacaatgaacaaacctaagacagattatgctggttatgcttgctgcgtaatatgcggtctaattgtcggaattatttttacagcgacactattaaaagttgtagaacgtaaattagttcatacaccatcaatagataaaacgataaaagatgcatatattagagaagattgtcctactgactggataagctataataataaatgtatccatttatctactgatcgaaaaacctgggaggaaggacgtaatacatgcaaagctctaaatccaaattcggatctaattaagatagagactccaaacgagttaagttttttaagaagccttagacgaggctattgggtaggagaatccgaaatattaaaccagacaaccccatataattttatagctaaaaatgccacgaagaatggaaatatatttgtagcacaacgaatactcccaaactgcattcgtgttacactatataacaattacactacatttttatcataccactacttcggttagatgttttagaaaaaaataaatatcgccgtaccgttcttgtttttataaaaataacaattaacaattatcaaattttttctttaatattttacgtggttgaccattcttggtggtaaaataatctcttagtgttggaatggaatgctgtttaatgtttccgcactcatcgtatattttgacgtatgcagtcacatcgtttacgcaatagtcagactgtagttctatcatgcttcctacatcagaaggaggaacagttttaaagtctcttggttttaatctattgccattagttttcatgaaatcctttgttttatccacttcacattttaaataaatgtccactatacattcttctgttaattttactagatcgtcatgggtcatagaatttataggttccgtagtccatggatccaaactagcaaacttcgcgtatacggtatcgcgattagtgtatacaccaactgtatgaaaattaagaaaacagtttaatagatcaacagaaatatttaatcctccgtttgatacagatgcgccatatttatggatttcggattcacacgttgtttgtctgaggggttcgtctagcgttgcttctacgtaaacttcgattcccatatattctttattgtcagaatcgcataccgatttatcatcatacactgtttgaaaactaaatggtatacacatcaaaataataaataataacgagtacattctgcaatattgttatcgtaattggaaaaatagtgttcgagtgagttggattatgtgagtattggattgtatattttattttatattttatattttatattttgtaataagaataaaatgctaatgtcaagtttattccaatagatgtcttattaaaaaacatatataataaataacaatggctgaatggcataaaattatcgaggatatctcaaaaaataataagttcgaggatgccgccatcgttgattacaagactacaaagaatgttctagctgctattcctaacagaacatttgccaagattaatccgggtgaaattattcctctcatcactaatcgtaatattctaaaacctcttattggtcagaaatattgtattgtatatactaactctctaatggatgagaacacgtatgctatggagttgcttactgggtacgcccctgtatctccgatcgttatagcgagaactcataccgcacttatatttttgatgggtaagccaacaacatccagacgtgacgtgtatagaacgtgtagagatcacgctacccgtgtacgtgcaactggtaattaaaataaaaagtaatattcatatgtagtgtcaattttaaatgatgatgatgaaatggataatatccatattgacgatgtcaataatgccggtattggcatacagctcatcgatttttagatttcattcagaggatgtggaattatgttatgggcatttgtattttgataggatctataatgtagtaaatataaaatataatccgcatattccatatagatataattttattaatcgcacgttaaccgtagatgaactagacgataatgtcttttttacacatggttattttttaaaacacaaatatggttcacttaatcctagtttgattgtctcattatcaggaaacttaaaatataatgatatacaatgctcagtaaatgtatcgtgtctcattaaaaatttggcaacgagtacatctactatattaacatctaaacataagacttattctctacatcggtccacgtgtattactataataggatacgattctattatatggtataaagatataaatgacaagtataatgacatctatgattttactgcaatatgtatgctaatagcgtctacattgatagtgaccatatacgtgtttaaaaaaataaaaatgaactcttaattatgctatgctattagaaatggataaaatcaaaattacggttgattcaaaaattggtaatgttgttaccatatcgtataacttggaaaagataactattgatgttacaccaaaaaagaaaaggatgtattattagcgcaatcagttgctgtcgaagaggcaaaagatgtcaaggtagaagaaaaaaatattatcgatattgaagatgacgatgatatggatgtagaaagcgcgtaatactatctataaacataagtatataataaatactttttatttacggtactcttgtagtggtgataccctactcgattatttttttaaaaaaaaaatacttattctgattcttctaaccatttccgtgttcgtttgaatgccacatcgacgtcaaagataggggagtagttgaaatctagttctgcattgttggtacgcacctcaaatgtagtgttggatatcttcaacgtatagttgttgagtagtgatggttttctaaatagaattctcttcatatcattcttgcacgcgtacatttttagcatccatcttggaatcctagatccttgttctattcccaatggtttcatcaatagaagattaaacatatcgtacgaacacgatggagagtaatcgtagcaaaagtaagcatttcctttaatcttagatcccggatactggatatattttgcagccaacacgtgcatccatgcagcatttcctacatatacccggctatgtaccgcgttatcatcgactgtacgatacataatgttaccgtgttgcttacattgctcgtaaaagactttcgtcaatttgtctccttctccgtaaattccagtgggtcttaggcaacaagtatacaattttgctccattcatgattacggaattattggctttcataaccagttgctcggccatacgtttactttttgcgtatacatgtcctggtgatatatcataaagggtatgctcatggccgatgaatggatcaccgtgtttattgggtcctattgcttccatgctactagtatagatcaaatacttgattcctaggtccacacaagctgccaatatagtctgtgttccataatagtttactttcatgatttcattatcggtgtattttccaaatacatccactagagcagccgtatgaataatcagatttaccccatctagcgcttctctcaccttatcaaagtcgtttatatcacattgtatatagtttataaccttaactttcgaggttattggttgtggatcttctacaatatctatgactctgatttcttgaacatcatctgcactaattaacagttttactatatacctgcctagaaatccggcaccaccagtaaccgcgtacacggccattgctgccactcataatatcagactacttattctattttactaaataatggctgtttgtataatagaccacgataatatcagaggagttatttactttgaaccagtccatggaaaagataaagttttaggatcagttattggattaaaatccggaacgtatagtttgataattcatcgttacggagatattagtcaaggatgtgattccataggcagtccagaaatatttatcggtaacatctttgtaaacagatatggtgtagcatatgtttatttagatacagatgtaaatatatttacaattattggaaaggcgttatctatttcaaaaaatgatcagagattagcgtgtgaagttattggtatttcttacataaatgaaaagataatacattttcttacaattaacgagaatggcgtttgatatatcagttaatgcgtctaaaacaataaatgcattagtttacttttctactcagcaaaataaattagtcatacgtaatgaagttaatgatacacactacactgtcgaatttgatagggacaaagtagttgacacgtttatttcatataatagacataatgacaccatagagataagaggggtgcttccagaggaaactaatattggttgcgcggttaatacgccggttagtatgacttacttgtataataagtatagttttaaactgattttagcagaatatataagacacagaaatactatatccggcaatatttattcggcattgatgacactagatgatttggctattaaacagtatggagacattgatctattatttaatgagaaacttaaagtagactccgattcgggactatttgactttgtcaactttgtaaaggatatgatatgttgtgattctagaatagtagtagctctatctagtctagtatctaaacattgggaattgacaaataaaaagtataggtgtatggcattagccgaacatatatctgatagtattccaatatctgagctatctagactacgatacaatctatgtaagtatctacgcgggcacactgagagcatagaggatgaatttgattattttgaagacgatgattcgtctacatgttctgccgtaaccgacagggaaacggatgtataattttttttatagcgtgaaggatatgataaaaaatataattgttgtatttatcccattccaatcaccttatatgattctgtaaaaaaattatactgtaacacaataaaggagtcttatagatgtatagaggtcagatactggtttgataaactgtttattccacataagtatgtttgactttatggttagacccgcatactttaacaaatcactgaaaattggagttaggtattgacctctcagaatcagttgccgttctggaacattaaatgtattttttatgatatactccaacgcatttatgtgggcatacaacaagtcattactaatggagtattccaagagttttagttgtctagtatttaacaagagaagagatttcaacagactgtttatgaactcgaatgccgcctcattgtcgcttatattgatgatgtcgaattctcccaatatcatcaccgatgagtagctcatcttgttatcgggatccaagttttctaaagatgtcattaaaccctcgatcatgaatggatttatcatcatcgtttttatgttggacatgagcttagtccgtttgtccacatctatagacgacgatttctgaattatttcatatatccctctctttaactccaggaacttgtcaggatggtctactttaatatgttctcgtctaagagatgaaaatctttggatggttgcacgcgacttttctctaaaggatgacgttgcccaagatcctctcttaaatgaatccatcttatccttggacaagatggacagtctattttccttagatggtttaatatttttgttacccatgatctataaaggtagacctaatcgtctcggatgaccatatatttattttcagttttattatacgcataaattgtaaaaaatatgttaggtttacgaaaatgtctcgtggggcattaatcgtttttgaaggattggacaaatctggaaaaacaacacaatgtatgaacatcatggaatctataccggcaaacacgataaaatatcttaactttcctcagagatccactgtcactggaaagatgatagatgactatctaactcgtaaaaaaacctataatgatcatatagttaatctattattttgtgcaaatagatgggagtttgcatcttttatacaagaacaactagaacagggaattactttaatagttgatagatacgcattttctggagtagcgtatgccgccgctaaaggcgcgtcaatgactctcagtaagagttatgaatctggattgcctaaacccgacttagttatattcttggaatctggtagcaaagaaattaatagaaacgtcggcgaggaaatttatgaagatgttacattccaacaaaaggtattacaagaatataaaaaaatgattgaagaaggagatattcattggcaaattatttcttctgaattcgaggaagatgtaaagaaggagttgattaagaatatagttatagaggctatacacacggttactggaccagtggggcaactgtggatgtaatagtgaaattacattttttataaatagatgttagtacagtgttataaatggatgaagcatattactctggcaacttggaatcagtactcggatacgtgtccgatatgcataccgaactcgcatcaatatctcaattagttattgccaagatagaaactatagataatgatatattaaacaaggacattgtaaattttatcatgtgtagatcaaacttggataatccatttatctctttcctagatactgtatatactattatagatcaagagaactatcagactgagttgattaattcattagacgacaatgaaattatcgattgtatagttaataagtttatgagcttttataaggataacctagaaaatatagtagatgctatcatcactctaaaatatataatgaataatccagattttaaaactacgtatgccgaagtactcggttccagaatagccgatatagatattaaacaagtgatacgtaagaatatactacaattgtctaatgatatccgcgaacgatatttgtgaaaaatattaaaaaaaaatactttttttattaaatgacgtcgcttcgcgaatttagaaaattatgctgtgatatatatcacgcatcaggatataaagaaaaatctaaattaattagagactttataacagatagggatgataaatatttgatcattaagctattgcttcccggattagacgatagaatttataacatgaacgataaacaaattataaaattatatagtataatatttaaacaatctcaggaagatatgctacaagatttaggatacggatatataggagacactattaggactttcttcaaagaaaacacagaaatccgtccaagagataaaagcattttaactttagaagacgtggatagtttcttaactacgttatcatccgtaactaaagaatcgcatcaaataaaattattgactgatatcgcatccgtttgtacatgtaatgatttaaaatgtgtagtcatgcttattgataaagatctaaaaattaaagcgggtcctcggtacgtacttaacgctattagtcctaatgcctatgatgtgtttagaaaatctaataacttgaaagagataatagaaaattcatctaaacaaaatctagactctatatctatttctgttatgactccaattaatcccatgttagcggaatcgtgtgattctgtcaataaggcgtttaaaaaatttccatcaggaatgtttgcggaagtcaaatacgatggtgaaagagtacaagttcataaaaataataacgagtttgccttctttagtagaaacatgaaaccagtactctctcataaagtggattatctcaaagaatacataccgaaagcatttaaaaaagctacgtctatcgtattggattctgaaattgttcttgtagacgaacataatgtaccgctcccgtttggaagtttaggtatacacaaaaagaaagaatataaaaactctaacatgtgtttgttcgtgtttgactgtttgtactttgatggattcgatatgacggacattccattgtacgaacgaagatcttttctcaaagatgttatggttgaaatacccaatagaatagtattctcagagttgacgaatattagtaacgagtctcagttaactgacgtattggatgatgcactaacgagaaaattagaaggattggtcttaaaagatattaatggagtatacgaaccgggaaagagaagatggttaaaaataaagcgagactatttgaacgagggttccatggcagattctgccgatttagtagtactaggtgcctactatggtaaaggagcaaagggtggtatcatggcagtctttctaatgggttgttacgacgatgaatccggtaaatggaagacggtaactaaatgttccggtcacgatgataatacgttaagggttttgcaagaccaattaacgatgattaaaattaacaaggatcccaaaaaaattccagagtggttagtagttaataaaatctatattcccgattttgtagtagaggatccgaaacaatctcagatatgggaaatttcaggagcagagtttacatcttccaagtcccataccgcaaatggaatatccattagatttcctagatttactaggataagagaggataaaacgtggaaagaatctactcatctaaacgatttagtaaacttgactaaatcttaatagttacatacaaactgaaaattaaaataacaccatttagttggtggtcgccatggatggtgttattgtatactgtctaaacgcgttagtaaaacatggcgaggaaataaatcatataaaaaatgatttcatgattaaaccatgttgtgaaagagtttgtgaaaaagttaagaacgttcacattggcggacaatctaaaaacaatacagtgattgcagatttgccatatatggataatgctgtatcggatgtatgcaattcactgtataaaaagaatgtatcaagaatatccagatttgctaatttgataaagatagatgacgatgacaagactcctactggtgtatataattattttaaacctaaagatgttattcctgttatcatatctataggaaaggataaagatgtctgtgaactattaatctcatcagacatatcgtgtgcatgcgtggagttaaattcatataaagtagccattcttcccatggatgtttccttttttaccaaaggaaatgcatcattgattattctcctgtttgatttctctatcgatgcagcacctctcttaagaagtgtaaccgataataatgttattatatctagacaccagcgtctacatgacgagcttccgagttccaattggttcaagttttacataagtataaagtccgactattgttctatattatatatggttgttgatggatctgtgatgcatgcgatagctgataatagaactcacgcaattattagcaaaaatatattagacaatactacgattaacgatgagtgtagatgctgttattttgaaccacagattaggattcttgatagagatgagatgctcaatggatcatcgtgtgatatgaacagacattgtattatgatgaatttacctgatgtaggcgaatttggatctagtatgttggggaaatatgaacctgacatgattaagattgctctttcggtggctggtaatttaataagaaatcgagactacattcccgggagacgaggatatagctactacgtttacggtatagcctctagataatttttttaagcacgaaataaaaaacataattttaaaccaatctatttcatactattttgtgtgatcaccatggacataaagatagatattagtatttctggtgataaatttacggtgactactaggagggaaaatgaagaaagaaaaaaatatctacctctccaaaaagaaaaaactactgatgttatcaaacctgattatcttgagtacgatgacttgttagatagagatgagatgtctactattctagaggaatattttatgtacagaggtctattaggcctcagaataaaatatggacgactctttaacgaaattaaaaaattcgacaatgatgcggaagaacaattcggtactatagaagaactcaagcagaaacttagattaaattctgaagagggagcagataactttatagattatataaaggtacaaaaacaggatatcgtcaaacttactgtatacgattgcatatctatgataggattgtgtgcatgcgtggtagatgtttggagaaatgagaaactgttttctagatggaaatattgtttacgagctattaaactgtttattaatgatcacatgcttgataagataaaatctatactgcagaatagactagtatatgtggaaatgtcatagaaagttaaaagttaatgagagcaaaaatatataaggttgtattccatatttgttattttttctgtaatagttaaaaaaatacattcgatggtctatctatcagattattatgtgttataaggtactttttctcataataaactagagtatgagtaagatagtgtttttcaaaacatataaatctaaaattgatggatgagatatacagctattaatttcgaaaatatattttaatctgataactttaaacatggatttttgatggtggtttaacgttttaaaaaaagattttgttattgtagtatatgataatattaaaagatggatataaagaatttgctgactgcatgtactattttttacattactacattggctacggcagatatacctactccgccaccaacgggtcatgtgacaagggagaatatcttgataagaggcataatcaatgttgtaatcggtgtccacctggagaatttgccaaggttagatgtaatggtaacgataacacaaaatgtgaacgctgcccacctcatacatataccacaatcccaattattctaatggatgtcatcaatgtagaaaatgcccaacaggatcatttgataaggtaaagtgtaccggaacacagaacagtaaatgttcgtgtcttcctggttggtattgcgctactgattcttcacagactgaagattgttgaaattgtataccaaaaaggagatgtccatgcggatactttggtggaatagatgaacaaggaaatcctatttgtaaatcgtgttgtgttggtgaatattgcgactacctacgtaattatagacttgatccatttcctccatgcaaactatctaaatgtaattaattatgattttgatgataatgttaccatacattatatcgctacttggttagtgtattattcagtatgaagacctattaataattacttatcttttgacgatcttgttataattataatataaaaatacttatggcatagtaactcataattgctgacgcgataaattcgtaataatctgttttgttcaaaggaatctacaggcataaaaataaaaatataatttataatatactcttacaacgccatcatgaataacagcagtgaattgattgctgttattaatggatttagaaatagtggacgattttgtgatattaatatagttattaatgatgaaaggataaacgctcataaactcatcctatctggagcctccgaatatttttccattctgttttccaataattttatcgattctaatgaatacgaagttaatctaagtcatttagattatcaaagtgttaacgatttgatcgattacatttatgggatacctttgagcctaactaacgataacgtgaaatatattctttcaaccgctgattttttacaaattggatctgccattacggagtgtgaaaattacatacttaaaaatctttgttctaaaaactgtatcgatttctacatatacgctgataaatataataacaagaaaatagaatcagcgtcgtttaacacaatattacaaaatattttgagactcatcaacgatgaaaactttaaatacttaacagaggaatcaatgataaaaattttaagcgatgatatgttaaatataaaaaatgaggatttcgccccactaattctcattaaatggttagagagtactcaacaatcatgcaccgtcgagttacttaaatgcctcagaatatcattgctttccccacaagttataaaatcactttatagtcatcgactggttagttcaatctacgaatgtataacattcttaaacaatatagcattcttggatgaatcatttcctagataccatagcatcgagttgatatctatcggtataagtaattcgcgtgataaaatttccataaactgctacaatcataaaaaaaatacatgggaaatgatatcttcacgtagatataggtgtagtttcgcagtggccgtcctggataatattatttatatgatgggtggatatgatcagtccccgtatagaagttcaaaggttatagcgtacaatacatgtacaaattcttggatatatgatataccagagctaaaatatcctcgttctaattgtgggggactggctgatgacgaatacatttattgtataggcggcatacgcgatcaggattcatcgttgacatctagtattgataaatggaagccatcaaaaccatattggcagaagtatgctaaaatgcgcgaaccaaaatgtgatatgggggttgcgatgttaaacggattaatatatgttataggtggaatcgttaaaggtgacacgtgtaccgacgcactagagagtttatcagaagatggatggatgaagcatcaacgtcttccaataaaaatgtccaatatgtcgacgattgttcatgatggcaagatttatatatctggaggttacaacaatagtagtgtagttaatgtaatatcgaatctagtccttagctataatccgatatatgatgaatggaccaaattatcatcattaaacattcctagaattaatcccgctctatggtcagcgcataataaattatatgtaggaggaggaatatctgatgatgttcgaactaatacatctgaaacatacgataaagaaaaagattgttggacattggataatggtcacgtgttaccacgcaattatataatgtataaatgcgaaccgattaaacataaatatccattggaaaaaacacagtacacgaatgattttctaaagtatttggaaagttttataggtagttgatagaacaaaatacataattttgtaaaaataaatcactttttatactaatatgacacgattaccaatacttttgttactaatatcattagtatacgctacaccttttcctcagacatctaaaaaaataggtgatgatgcaactctatcatgtaatcgaaataatacaaatgactacgttgttatgagtgcttggtataaggagcccaattccattattcttttagctgctaaaagcgacgtcttgtattttgataattataccaaggataaaatatcttacgactctccatacgatgatctagttacaactatcacaattaaatcattgactgctagagatgccggtacttatgtatgtgcattctttatgacatcgcctacaaatgacactgataaagtagattatgaagaatactccacagagttgattgtaaatacagatagtgaatcgactatagacataatactatctggatctacacattcaccagaaactagttctgagaaacctgattatatagataattctaattgctcgtcggtattcgaaatcgcgactccggaaccaattactgataatgtagaagatcatacagacaccgtcacatacactagtgatagcattaatacagtaagtgcaacatctggagaatccacaacagacgagactccggaaccaattactgataaagaagaagatcatacagtcacagacactgtctcatacactacagtaagtacatcatctggaattgtcactactaaatcaaccaccgatgatgcggatctttatgatacgtacaatgataatgatacagtaccatcaactactgtaggtagtagtacaacctctattagtaattataaaaccaaggactttgtagaaatatttggtattaccgcattaattatattgtcggccgtggcaatattctgtattacgtattatatatgtaataaacgttcacgtaaatacaaaacagagaacaaagtctagatttttgacttacataaatgtctgggatagtaaaatctatcatattgagcggaccatctggttcaggaaagacagccatagccaaaagactatgggaatatatttggatttgtggtgtcccataccactagatttcctcgtcctatggaacgagaaggtgtcgattaccattacgttaacagagaggccatctggaagggaatagccgccggaaactttctagaacatactgagtttttaggaaatatttacggaacttctaaaactgctgtgaatacagcggctattaataatcgtatttgtgtgatggatttaaacatcgacggtgttagaagttttaaaaatacttacctaatgccttactcggtgtatataagacctacctctcttaaaatggttgagaccaagcttcgttgtagaaacactgaagctaacgatgagattcatcgtcgcgtgatattggcaaaaacggatatggatgaggccaacgaagcaggtctattcgacactattattattgaagatgatgtgaatttagcatatagtaagttaattcagatactacaggaccgtattagaatgtattttaacactaattaaagacttaagacttaaaacttgataattaataatataactcgtttttatatgtggctatttcaacgtctaatgtattagttaaatattaaaacttaccacgtaaaacttaaaatttaaaatgatatttcattgacagatagatcacacattatgaactttcaaggacttgtgttaactgacaattgcaaaaatcaatgggtcgttggaccattaataggaaaaggtggatttggtagtatttatactactaatgacaataattatgtagtaaaaatagagcccaaagctaacggatcattatttaccgaacaggcattttatactagagtacttaaaccatccgttatcgaagaatggaaaaaatctcacaatataaagcacgtaggtcttatcacgtgcaaggcatttggtctatacaaatccattaatgtggaatatagattcttggtaattaatagattaggtgtagatctagatgcggtgatcagagccaataataatagattaccaaaaaggtcggtgatgttgatcggaatcgaaatcttaaataccatacaatttatgcacgagcaaggatattctcacggagatattaaagcgagtaatatagtcttggatcaaatagataagaataaattatatctagtggattacggattggtttctaaattcatgtctaatggcgaacatgttccatttataagaaatccaaataaaatggataacggtactctagaatttacacctatagattcgcataaaggatacgttgtatctagacgtggagatctagaaacacttggatattgtatgattagatggttgggaggtatcttgccatggactaagatatctgaaacaaagaattgtgcattagtaagtgccacaaaacagaaatatgttaacaatactgcgactttgttaatgaccagtttgcaatatgcacctagagaattgctgcaatatattaccatggtaaactctttgacatattttgaggaacccaattacgacgagtttcggcacatattaatgcagggtgtatattattaagtgtggtgtttggtcgatgtaaaatttttgtcgataaaaattaaaaaataacttaatttattattgatctcgtgtgtacaaccgaaatcatggcgatgttttacgcacacgctctcggtgggtacgacgagaatcttcatgcctttcctggaatatcatcgactgttgccaatgatgtcaggaaatattctgttgtgtcagtttataataacaagtatgacattgtaaaagacaaatatatgtggtgttacagtcaggtgaacaagagatatattggagcactgctgcctatgtttgagtgcaatgaatatctacaaattggagatccgatccatgatcaagaaggaaatcaaatctctatcatcacatatcgccacaaaaactactatgctctaagcggaatcgggtacgagagtctagacttgtgtttggaaggagtagggattcatcatcacgtacttgaaacaggaaacgctgtatatggaaaagttcaacatgattattctactatcaaagagaaggccaaagaaatgagtacacttagtccaggacctataattgattaccacgtctggataggagattgtatctgtcaagttactgctgtggacgtacatggaaaggaaattatgagaatgagattcaaaaagggtgcggtgcttccgatcccaaatctggtaaaagttaaacttggggagaatgatacagaaaatctttcttctactatatcggcggcaccatcgaggtaaccacctctctggaagacagcgtgaataatgtactcatgaaacgtttggaaactatacgccatatgtggtctgttgtatatgatcattttgatattgtgaatggtaaagaatgctgttatgtgcatacgcattcatctaatcaaaatcctataccgagtactgtaaaaacaaatttgtacatgaagactatgggatcatgcattcaaatggattccatggaagctctagagtatcttagcgaactgaaggaatcaggtggatggagtcccagaccagaaatgcaggaatttgaatatccagatggagtggaagacactgaatcaattgagagattggtagaggagttcttcaatagatcagaacttcaggctggtaaattagtcaaatttggtaattctattaattgttaaacatacatctgtttcagctaagcaactaagaacacgtatacggcagcagcttcctttatactctcatcttttaccaacacaaagggtggatatttgttcattggagttgataataatacacacaaagtatttggattcacggtgggttacgactacctcagactggtagagaatgatatagaaaagcatatcaaaagactttgtgttgtgcatttctgtgagaagaaagaggacatcaagtacgcgtgtcgattcatcaaggtatataaacctggggatgaggctacctcgacatacgtgtgcgctatcaaagtggaaagatgctgttgtgctgtgtttgcagattggccagaatcatggtatatggatactaatggtatcaagaagtattctccagatgaatgggtgtcacatataaaattttaattaatgtaactatagagaacaaataataggttgtaatatcatatagacaataactaacaattaattagtaactgttatctcttttttaactaaccaactaactatatacctattaatacatcgtaattatagttcttaacatctattaatcattgattcgcttctttaattttttataaactaacattgttaattgaaaagggataacatgttacagaatataaattatatatggatttttttaaaaaggaaatacttgactggagtgtatatttatctcttcattatatagcacgcgtgtgttccaattcttccacatcccatataatacaggattataatctcattcgaacatacgagaaagtggataaaacaatagttgattttttatctaggttgccaaatttattccatattttagaatatggggaaaatattctacatatttattctatggatgatgctaatacgaatattataattttttttctagatagagtattaaatattaataagaacgggtcatttatacacaatctcaggttatcatcatccattaatataaaagaatatgtatatcaattagttaataatgatcatccagataataggataagactaatgcttgaaaatggacgtagaacaagacattttttgtcctatatatcagatacagttaatatctatatatgtattttaataaatcatggattttatatagatgccgaagacagttacggttgtacattattacatagatgtatatatcactataagaaatcagaatcagaatcatacaatgaattaattaagatattgttaaataatggatcagatgtagataaaaaagatacgtacggaaacacaccttttatcctattatgtaaacacgatatcaacaacgtggaattgtttgagatatgtttagagaatgctaatatagactctgtagactttaatagatatacacctcttcattatgtctcatgtcgtaataaatatgattttgtaaagttattaatttctaaaggagcaaatgttaatgcgcgtaataaattcggaactactccattttattgtggaattatacacggtatctcgcttataaaactatatttggaatcagacacagagttagaaatagataatgaacatatagttcgtcatttaataatttttgatgctgttgaatctttagattatctattatccagaggagttattgatattaactatcgtactatatacaacgaaacatctatttacgacgctgtcagttataatgcgtataatacgttggtctatctattaaacagaaatggtgattttgagacgattactactagtggatgtacatgtatttcggaagcagtcgcaaacaacaacaaaataataatggaagtactattgtctaaacgaccatctttgaaaattatgatacagtctatgatagcaattactaaaaataaacaacataatgcagatttattgaaaatgtgtataaaatatactgcgtgtatgaccgattatgatactcttatagatgtacagtcgctacagcaatataaatggtatattttaaaatgtttcgatgaaatagatatcatgaagagatgttatataaaaaataaaactgtattccaattagttttttgtatcaaagacattaatactttaatgagatacggtaaacatccttctttcgtgaagtgcactagtctcgacgtatacggaagtcgtgtacgtaatatcatagcatctattagatatcgtcagagattaattagtctattatccaagaagctggatgcgggagataaatggtcgtgttttcctaacgaaataaaatataaaatattggaaaactttaacgataacgaactgtccacatatctaaaaatcttataaacactattaaaatataaaatctaagtaggataaaatcacactacatcattgtttccttttagtgctcgacagtgtatactatttttaacactcataaataaaaatgaaaacgatttccgttgttacgttgttatgcgtactacctgctgttgtttattcaacatgtactgtacccactatgaataacgctaaattaacgtctaccgaaacatcgtttaataataaccagaaagttacgtttacatgtgatcagggatatcattcttcggatccaaatgctgtctgcgaaacagataaatggaaatacgaaaatccatgcaaaaaaatgtgcacagtttctgattacatctctgaactatataataaaccgctatacgaagtgaattccaccatgacactaagttgcaacggcgaaacaaaatattttcgttgcgaagaaaaaaatggaaatacttcttggaatgatactgttacgtgtcctaatgcggaatgtcaacctcttcaattagaacacggatcgtgtcaaccagttaaagaaaaatactcatttggggaatatatgactatcaactgtgatgttggatatgaggttattggtgcttcgtacataagttgtacagctaattcttggaatgttattccatcatgtcaacaaaaatgtgatataccgtctctatctaatggattaatttccggatctacattttctatcggtggcgttatacatcttagttgtaaaagtggttttatactaacgggatctccatcatccacatgtatcgacggtaaatggaatcccgtactcccaatatgtgtacgaactaacgaagaatttgatccagtggatgatggtcccgacgatgagacagatttgagcaaactctcgaaagacgttgtacaatatgaacaagaaatagaatcgttagaagcaacttatcatataatcatagtggcgttaacaattatgggcgtcatatttttaatctccgttatagtattagtttgttcctgtgacaaaaataatgaccaatataagttccataaattgctaccgtaaatataaatccgttaaaataattaataattaataattaataattaataacgaacaagtatcaaaagattaaagacttatagctagaatcaattgagatgtcttcttcagtggatgttgatatctacgatgccgttagagcatttttactcaggcactattataacaagagatttattgtgtatggaagaagtaacgccatattacataatatatacaggctatttacaagatgcgccgttataccgttcgatgatatagtacgtactatgccaaatgaatcacgtgttaaacaatgggtgatggatacacttaatggtataatgatgaatgaacgcgatgtttctgtaagcgttggcaccggaatactattcatggaaatgtttttcgattacaataaaaatagtatcaacaatcaactaatgtatgatataattaatagcgtatctataattctagctaatgagagatatagaagcgcttttaacgacgatggtatatacatccgtagaaatatgattaacaagttgtacggatacgcatctctaactactattggcacgatcgctggaggtgtttgttattatctgttgatgcatctagttagtttgtataaataattatttcaatatactagttaaaattttaagattttaaatgtataaaaaactaataacgtttttatttgtaataggtgcattagcatcctattcgaataatgagtacactccgtttaataaactgagtgtaaaactctatatagatggagtagataatatagaaaattcatatactgatgataataatgaattggtgttaaattttaaagagtacacaatttctattattacagagtcatgcgacgtcggatttgattccatagatatagatgttataaacgactataaaattattgatatgtataccattgactcgtctactattcaacgcagaggtcacacgtgtagaatatctaccaaattatcatgccattatgataagtacccttatattcacaaatatgatggtgatgagcgacaatattctattactgcagagggaaaatgctataaaggaataaaatatgaaataagtatgatcaacgatgatactctattgagaaaacatactcttaaaattggatctacttatatatttgatcgtcatggacatagtaatacatattattcaaaatatgatttttaaaaatttaaaatatattatcacttcagtgacagtagtcaaataacaaacaacaccatgagatatattataattctcgcagttttgttcattaatagtatacacgctaaaataactagttataagtttgaatccgtcaattttgattccaaaattgaatggactggggatggtctatacaatatatcccttaaaaattatggcatcaagacgtggcaaacaatgtatacaaatgtaccagaaggaacatacgacatatccgcatttccaaagaatgatttcgtatctttctgggttaaatttgaacaaggcgattataaagtggaagagtattgtacgggactatgcgtcgaagtaaaaattggaccaccgactgtaacattgactgaatacgacgaccatatcaatttgtacatcgagcatccgtatgctactagaggtagcaaaaagattcctatttacaaacgcggtgacatgtgtgatatctacttgttgtatacggctaacttcacattcggagattctgaagaaccagtaacatatgatatcgatgactacgattgcacgtctacaggttgcagcatagactttgccacaacagaaaaagtgtgcgtgacagcacagggagccacagaagggtttctcgaaaaaattactccatggagttcggaagtatgtctgacacctaaaaagaatgtatatacatgtgcaattagatccaaagaagatgttcccaatttcaaggacaaaatggccagagttatcaagagaaaatttaataaacagtctcaatcttatttaactaaatttctcggtagcacatcaaatgatgttaccacttttcttagcatgcttaacttgactaaatattcataactaatttttattaatgatacaaaaacgaaataaaactgcatattatacactggttaacgcccttataggctctaaccattttcaagatgaggtccctgattatagtccttctgttcccctctatcatctactccatgtctattagacgatgtgagaagactgaagaggaaacatggggattgaaaatagggttgtgtataattgccaaagatttctatcccgaaagaactgattgcagtgttcatctcccaactgcaagtgaaggattgataactgaaggcaatggattcagggatatacgaaacaccgataaattataaaaaaagcaatgtgtccgctgtttccgttaataatactattttcgtaactggcggattattcataaataactctaatagcacgatcgtggttaacaatatggaaaaacttgacatttataaagacaaacaatggtcgattatagaaatgcctatggctagggtatatcacggcatcgactcgacatttggaatgttatattttgccggaggtctatccgttaccgaacaatatggtaatttagagaaaaacaacgagatatcttgttacaatcctagaacgaataagtggtttgatatttcatatactatttataagatatccatatcatcattgtgtaaactaaataacgtcttctatgtatttagtaaggacattggatatgtggaaaagtatgatggtgcatggaagttagtacatgatcgtctccccgctataaaggcattatcaacttctccttattgattgaaaatgaaaatataaatagtttttatgtatagcagtattaccctatagttttattgcttactactaacatggatacagatacagatacagatacagatacagatacagatacagatacagatacagatgttacaaatgtagaagatatcataaatgaaatagatagagagaaagaagaaatactaaaaaatgtagaaattgaaaataataaaaacattaacaagaatcatccaagtggatatattagagaagcactcgttattaatacaagtagtaatagtgattccattgataaagaagttatagaatgtatcagtcacgatgtaggaatatagatcatatctactaatttttataatcaatacaaaacataaaaaacaactcgttattacatagcaggcatggaatccttcaagtattgttttgataacgatggcaagaaatggattatcggaaatactttatattctggtaattcaatactctataaggtcagaaaaaatttcactagttcgttctacaattacgtaatgaagatagatcacaaatcacacaagccattgttgtctgaaatacgattctatatatctgtattggatcctttgactatcgacaactggacacgggaacgtggtataaagtatttggctattccagatctgtatggaattggagaaaccgatgattatatgttcttcgttataaagaatttgggaagagtattcgccccaaaggatactgaatcagtcttcgaagcatgtgtcactatgataaacacgttagagtttatacactctcgaggatttacccatggaaaaatagaaccgaggaatatactgattagaaataaacgtctttcactaattgactattctagaactaacaaactatacaagagtggaaactcacatatagattacaacgaggacatgataacttcaggaaatatcaattatatgtgtgtagacaatcatcttggagcaacagtttcaagacgaggagatttagaaatgttgggatattgcatgatagaatggttcggtggcaaacttccatggaaaaacgaaagtagtataaaagtaataaaacaaaaaaaagaatataaaaaatttatagctactttctttgaggactgttttcctgaaggaaatgaacctctggaattagttagatatatagaattagtatacacgttagattattctcaaactcctaattatgacagactacgtagactgtttatacaagattgaaattatattctttttttatagagtgtggtagtgttacggatatctaatattaatattagactatctctatcgcgctacacgaccaatatcgattactatgaatatcttctatgaaaggagagaatgtattcatttctccagcgtcaatctcgtcagtattgacaatactgtattatggagctaatggatccactgctgaacagctatcaaaatatgtagaaacggaggagaacacggataaggttagcgctcagaatatctcattcaaatccataaataaagtatatgggcgatattctgccgtgtttaaagatttctttttgggaaaaattggcgataagtttcaaactgttgacttcactgattgtcgcactatagatgcaatcaacaagtgtgtagatatctttactgaggggaaaatcaatccactattggatgaaccattgtctcctagcaattagtgccgtatactttaaagcaaaatggttgacgccattcgaaaaggaatttaccagtgattatcccttttacgtatcaccaacggaaatggtagatgtaagtatgatgtctatgtacggcgagctatttaatcacgcatctgtaaaggaatcattcggcaacttttcaatcatagaactgccatatgttggagatactagtatgatggtcattcttccagacaagattgatggattagaatccatagaacaaaatctaacagatacaaattttaagaaatggtgtaactctctggatgctatgtttatagatgttcacattcccaagtttaaggtaacaggctcgtataatctggtggatactctagtaaagtcaggactgacagaggtgttcggttcaactggagattatagcaatatgtgtaatttagatgtgagtgtcgacgctatgatccacaaaacgtatatagatgtcaatgaagagtatacagaagcagctgcagcaacttgtgcactggtgtcagactgtgcatcaacaattacaaatgagttctgtgtagatcatccgttcatctatgtgattaggcatgttgatggaaaaattcttttcgttggtagatattgctctccaacaactaattgttaaccattttttttaaaaaaaatagaaaaaacatgtggtattagtgcaggtcgttgttcttccaattgcaattggtaagatgacagccaactttagtacccacgtcttttcaccacagcactgtggatgtgacagactgaccagtattgatgacgtcaaacaatgtttgactgaatatatttattggtcgtcctatgcataccgcaacaggcaatgcgctggacagttgtattccacactcctctcttttagagatgatgcggaattagtgttcatcgacattcgcgagctggtaaaaaatatgccgtgggatgatgtcaaagattgtacagaaatcatccgttgttatataccggatgagcaaaaaaccatcagagagatttcggccatcatcggactttgtgcatatgctgctacttactggggaggtgaagaccatcccactagtaacagtctgaacgcattgtttgtgatgcttgagatgctcaattacgtggattataacatcatattccggcgtatgaattgatgagttgtacatcttgacattttcttctttcttctcttctccctttcccagaaacaaacttttttacccactataaaataaaatgagtatactacctgttatatttcttcctatatttttttattcttcattcgttcagacttttaacgcgtctgaatgtatcgacaaagggtaatattttgcatcattcatggagttagaaaacgagccagtaatcttaccatgtcctcaaataaatacgctatcatccggatataatatattagatattttatgggaaaaacgaggagcggataatgatagaattataccgatagataatggtagcaatatgctaattctgaacccgacacaatcagactctggtatttatatatgcattaccacgaacgaaacctactgtgacatgatgtcgttaaatttgacaatcgtgtctgtctcagaatcaaatatagattttatctcgtatccacaaatagtaaatgagagatctactggcgaaatggtatgtcccaatattaatgcatttattgctagtaacgtaaacgcagatattatatggagcggacatcgacgccttagaaataagagacttaaacaacggacacctggaattattaccatagaagatgttagaaaaaatgatgctggttattatacatgtgttttagaatatatatacggtggcaaaacatataacgtaaccagaattgtaaaattagaggtacgggataaaataatacatcctactatgcaattaccagaaggtgttgtaacttcaataggtagtaatttgactattgcgtgtagagtatcgttgagacctcccacaacggatgcagacgtcttttggataagtaatggtatgtattacgaagaagatgatggggacggagacggtagaataagtgtagcaaataaaatctatatgaccgataagagacgtgttattacatcccggttaaacattaatcctgtcaaggaagaagatgctacaacgtttacgtgtatggcgtttactattcctagcatcagcaaaacagttactgttagtataacgtgaatgtatgttgttacatttccatgtcaattgagtttataagaatttttatacattatcttccaacaagcaattgacgaacgtattgctatgattaactcccacgatactatgcatattattaatcattaacttgcagactatacctagagctattttgacatactcgtgttcttgtgtaattgcagtatctatattattaaagtacgtaaatctagctatagttttattatttaattttagataatataccgtctccttatttttaaaaattgccacatcctttattaaatcatgaatgggaatttctatgtcatcgttagtatattgtgaacaacaagagcagatatctataggaaagggtggaatgcgatacattgatctatgtagttttaaaacacacgcaaactttgaagaatttatataaatcattccatcgatacatccttctatgttgacatgtatatatccaggaattcttttattaatgtcaggaaatgtataaactaaaacattgcccggaagcggagcttctaccggagttatatccgttcttaacttacaaaatgtaaccaatacctttgcatgacttgttttgttcggcaacgttagtttaaacttgacgaatggattaattacaatagcatgatccgcgcatctattaagtttttttactttaacgcccttgtatgtttttacagagactttatctaaatttctagtacttgtatgtgttataaatataacgggatatagaaccgaatcacctaccttagatacccaattacattttatcagatccagataataaacaaattttgtcgccctaactaattctatattgttatatattttacaattggttatgatatcatgtaataacttggaatctaacgcacatcgtcgtacgtttacacaattgtgatttagtgtagtatatctacacatgtatttttccgcgctatagtattctggactagtgataaaactatcgttatatctgtcttcaatgaactcatcgagatattgctctctgtcatattcatacacctgcataaactttctagacatcttacaatccgtgttattttaggatcatatttacatatttactggtataaagatgttagattagttaatgggaatcgtctataataatgaatattaaacaattatatgaggacttttaccacaaagcatcataaaaatgagtcgtcgtctgatttatgttttaaatatcaaccgcaaatcaactcataaaatacaagagaatgaaatatatacatattttagtcattgcaatatagaccatacttctacagaacttgattttgtagttaaaaactatgatctaaacagacgacaacatgtaactgggtatactgcactacactgctatttgtataataattactttacaaacgatgtactgaagatattattaaatcatgacgtaaatgtaacgatgaaaaccagtagcggacgtatgcctgtttatatattgcttactagatgttgtaatatttcacatgatgtagtgatagatatgatagacaaagataaaaaccacttatcgcatagagactattccaacctactactagagtatataaaatctcgttacatgttattgaaggaagaggatatcgatgagaacatagtatcaactttattagataagggaatcgatcctaactttaaacaagacggatatacagcgttacattattattatttgtgtctcgcacacgtttataaaccaggtgagtgtagaaaaccgataacgataaaaaaggccaagcgaattatttctttgtttatacaacatggagctaatctaaacgcgttagataattgtggtaatacaccattccatttgtatcttagtattgaaatgtgtaataatattcatatgactaaaatgctgttgacttttaatccgaatttcaaaatatgtaataatcatggattaacgcctatactatgttatataacttccgactacatacaacacgatattcttgttatgttaatacatcactatgaaacaaatgttggagaaatgccgatagatgagcgtcgtatgatcgtattcgagtttatcaaaacatattctacacgtcctgcagattcgataacttatttgatgaataggtttaaaaatataaatatttatacccgctatgaaggaaagacattattacacgtagcatgtgaatataataatacacaagtaatagattatcttatacgtatcaacggagatataaatgcgttaaccgacaataacaaacacgctacacaactcattatagataacaaagaaaattccccatataccattaattgtttactgtatatacttagatatattgtagataagaatgtgataagatcgttggtggatcaacttccatctctacctatcttcgatataaaatcatttgagaaattcatatcctactgtatacttttagatgacacattttacgataggcacgttaagaatcgcgattctaaaacgtatcgatacgcattttcaaaatacatgtcgttcgataaatacgatggtataataactaaatgtcacgacgaaacaatgttactcaaactgtccactgttctagacactacactatatgcagttttaagatgtcataattcgagaaagttaagaagatacctcaccgagttaaaaaaatataataacgataagtcctttaaaatatattctaatattatgaatgagagataccttaatgtatattataaagatatgtacgtgtcaaaggtatatgataaactatttcctgttttcacagataaaaattgtctactaacattactaccttcagaaattatatacgaaatattatacatgctgacaattaacgatctttataatatatcgtatccacctaccaaagtatagttgtatttttctcatgcgatgtgtgtaaaaaaactgatattatataaatattttagtgccgtataataaagatgacgatgaaaatgatggtacatatatatttcgtatcattatcattattgttattgctattccacagttacgccatagacatcgaaaatgaaatcacagaattcttcaataaaatgagagatactctaccagctaaagactctaaatggttgaatccagcatgtatgttcggaggcacaatgaatgatatggccactctaggagagccattcagtgcaaagtgtcctcctattgaagacagtcttttatcgcacagatataaagactatgtggttaaatgggagaggctagaaaagaatagacggcgacaggtttctaataaacgtgttaaacatggtgatttatggatagccaactatacatctaaattcagtaaccgtaggtatttgtgcaccgtaactacaaagaatggtgactgtgttcagggtatagttagatctcatattaaaaaacctccttcatgcattccaaaaacatatgaactaggtactcatgataagtatggcatagacttatactgtggaattctttacgcaaaacattataataatataacttggtataaagataataaggaaattaatatcgacgacattaagtattcacaaacgggaaaggaattaattattcataatccagagttagaagatagcggaagatacgactgttacgttcattacgacgacgttagaatcaagaatgatatcgtagtatcaagatgtaaaatacttacggttataccgtcacaagaccacaggtttaaactaatactagatccgaaaatcaacgtaacgataggagaacctgccaatataacatgcactgctgtgtcaacgtcattattgattgacgatgtactgattgaatgggaaaatccatccggatggcttataggattcgattttgatgtatactctgttttaactagtagaggcggtatcaccgaggcgaccttgtactttgaaaatgttactgaagaatatataggtaatacatataaatgtcgtggacacaactattattttgaaaaaacccttacaactacagtagtattggagtaaatatacaatgcatttttatatacattactgaattattattactgaattattattactgaattattattaattatatcgtatttgtgctatagaatggatgaagatacgcgactatctaggtatttgtatctcaccgatagagaacatataaatgtagactctattaaacagttgtgtaaaatatcagatcctaatgcatgttatagatgtggatgtacggctttacatgagtacttttataattatagatcagtcaacggaaaatacaagtatagatacaacggttactatcaatattattcatctagcgattatgaaaattataatgaatattattatgatgattatgatagaactggtatgaacagcgagagcgatagtgagagtgataatatatcaatcaaaacagaatatgagaatgaatatgaattctatgatgaaacacaagatcaaagtacacaacacaatgacttataaaaatactaaaactggagagactgattacacgtacctctctaatgggggttgcctgcatactatcgtaatggggtcgatggttgattattgattagtatattccttattcacacaaaaagaacatttttataaacatgaaaccactgtctaaatgtaattatgatcttgatttatagatgaagatcagcctttagaggattttaaccagtatgtttaatatgaaaaaaataaacataacatattttgagattaagcgctattgtgcttaattattttgctctataaactgaatatatagccacaattattgacgggcttgtttatgaccggcaatcatgaatttacagaaattatctctggctatatatcttactgcgacatgttcgtggtgttatgaaacatgcataagaaaaactgcgttgtatcatgacattcaattggagcatgtagaagacaataaagatagtgtagcgtcgctaccgtacaagtagtcaatcaaagagaacgtagtagattgttggctacatttaattggacagatatagctgagggtgttagaaatgagttcattaaaatatgtgatatcaacggaacatatttatataattatactattgctgttagtataattattgattccacggaagaactaccaacagttactccaattacaacaacatatgaaccttctacatataattatactatcgatgatagcactgttattactactgaagaactacaagtgactcctcatatggatctccatcgatgatacatgtattaaaatactttccgaataagtcttttaaatattgtattaattatgaaaaactatgctatgcgagtatgatgcaaagatgtttaatgatacgatactagattttatctctagcgagagatgtcgttagaatcatttatcataactacgtttaataataattcatcaacgaatatcgataacatgtgtcatttatacgttaaagtctgtccgtcttctctattgtttagactgtttgtagaatgctgtgatataaacaaactagtagaaggtacgactccgttacactgttatctaatgaatgaaggatttgaatcatctgttttaaaaaacctattaaaggagtatgtcatgaatacgtttaatgttcatgacatccattacacaaatatttaactcatgatgaagttgagaatgatatgctttctgatagtatagatagctttagctaatataaaaatatattaatccactatatattctagacttgatttaaaaccgataaactactactacgtactgtataagttgttaaaaaaaggagcagaccctaattatgtagatgatagaggtaatacttttcttcattacttctgcatctatatgtccacttatgagaaaacgtcattcaataagatgcatcgtgaaaagaaatttattaaagagttggtaaaatatgaaaccgaaagtaaataatataggaaatacacctctacataactacgtatctcaatatgatatcactctcattcctcatccacaacccattaaaaaaatggaaattaaagccctctattagcataaacggctacaggtctacctttacaatggcctttccttgtgcccagttcagaccctgtcattgccacgctactaaggactccctgaataccgtggccgacgtcagacattgtctgactgaatacatcctgtgggtttctcatagatggacccatagagaaagcgcagggtctctctacaggcttctcatctctttcagaactgatgcaacggagctctttggtggtgagttgaaggattcacttccgtgggacaatatcgacaattgcgtggagatcattaaatgtttcatcagaaatgactccatgaaaaccgccgaagaacttcgtgcaatcattggactttgtactcaatcagctatcgtctctggaagagtcttcaacgataagtatatcgacatactacttatgctgcgaaagattctgaacgagaacgactatctcaccctcttggatcatatccgcactgctaaatactaaatctccttcatgctctctcactacactttttatcatcttatgaggaatgattgccttcatcatttttcgtgaaataggaataattagcaccagaatagctatggattattgtggtagagagtgcactattctatgtcgtctactggatgaagatgtgacgtacaaaaaaataaaactagagattgaaacgtgtcacaacttatcaaaacatatagatagacgaggaaacaatgcgctacattgttacgtctccaataaatgcgatacagacattaagattgttcgactgttactctctcgcggagtcgagagactttgtagaaacaacgaaggattaactccgctaggagcatacagtaagcatagatacgtaaaatctcagattgtgcatctactgatatccagctattcgaattcctctaacgaactcaagtcgaatataaatgatttcgatctgtcttcggataatatcgacttacgtctgctaaaatacctaattgtggataaacggatacgtccgtccaagaatacgaattatgcaatcaatggtctcggattggtggatatatacgtaacgacgcctaatccgagaccagaagtattgctatggcttcttaaatcagaatgttacagcaccggttacgtatttcgtacctgtatgtacaacagtgatatgtgtaagaactctcttcattactatatatcgtctcatagagaatctcaatctctatccaaggatgtaattaaatgtttgatcaataacaatgtttccatccatggcagagacgaaggaggatctttacccatccaatactactggtctttctcaaccatagatatagagattgttaaattattattaataaaggatgtggacacgtgtagagtatacgacgtcagccctatattagaggcgtattatctaaacaagcgatttagagtaaccccatataatgtagacatggaaatcgttaatcttcttattgagagacgtcatactcttgtcgacgtaatgcgtagtattacttcgtacgattccagagaatataaccactacatcatcgataacattctaaagagatttagacaacaggatgaatccatcgtacaagccatgttgataaactacttacattacggcgatatggtcgttcgatgcatgttagataacggacaacaactatcctctgcacgactactttgttaataataatctcgtcgatgtaaacgtcgtaaggtttatcgtggaaaatatggacacgcggctgtaaatcacatatctaacaatggccgtctatgtatgtacggtctgatattatcgagatttaataattgcgggtatcactgttatgaaaccatactaatagatgtatttgatatactaagcaagtacatggatgatatagatatgatcgataatgagaataaaactctactatattacgcggtcgatgtcaataatatacaatttgcaaagcggttattggaatatggagcgagtgttacaacatcacgctcgataatcaatacggccatccagaaaagcagttaccaaagagaaaacaaaacgaggatagttgatttattacttagctaccatcccactctagagactatgattgacgcatttaatagagatatacgctatctatatcctgaaccattattcgcctgtatcagatacgccttaatcctagatgatgattttccttctaaagtaagtatgatatcgccggtcatcataaggaactaaagcgctatagagtagacattaatagaatgaagaatgcctacatatcaggcgtctccatgtttgatatattatttaaacgaagcaaacgccacagactgagatacgcaaagaatccgacatcaaatggtacaaaaaagaactaacgtccatcattacagaaactgtaaagaacagtgagaggatcgactccatagtggacaacattaatacagacgataacttgatttcgaaattacccatggagatactttattactccattaaataatttatcatggagtgataatgtcctgtttcatttgtttccatgacatattacaaaatcgattccgtccaagatgataaaaacatttaccggcatcataaacacggagtttattttatatgtctcgcataaacattactaaaaaaatatattgttctgtttttctttttctttttctttttctttcgtacatctctaattatgaaaaagtaaatgatgaaatgtatgagatgggcgagatggacgagattgtgagcatcgttcgcgacagtatgtggtacatacctaacgtatttatggacgacggtaagaatgaaggtcacgtttctgtcaacaatgtttgtcatatgtattttacgttctttgatgtggatacatcgtctcatctgtttaagctagttattaaacactgcgatctgaataaacgaggtaactctccattacattgctatacgatgaatacacgatttaatccatctgtattaaagatattgttacaccacggcatgcgtaactttgatagcaaggatgaaaaaggacaccactatctgattcattcactatcaatcgataacaagatctttgatatactaacggacaccattgatgactttagtaaatcatccgatctattgctgtgttatcttagatataaattcaatgggagcttaaactactacgttctgtacaaaggatccgaccctaattgcgccgacgaggatgaactcacttctcttcattactactgtaaacacatatccacgttctacaaaagcaattattacaagttaagtcacactaagatgcgagccgagaagcgattcatctacgcgataatagattatggagcaaacattaacgcggttacacacttaccttcaacagtataccaaacatagtcctcgtgtggtgtatgctcttttatctcgaggatacgtaataatcttgattgtacacccatcatggaacgattgtgcaacaggtcatattctcataatgttactcaattggcacgaacaaaaggaagaaggacaacatctactttatctattcataaaacataatcaaggatacactctcaatatactacggtatctactagataggttcgacattcagaaagacgaatactataataccgcctttcaaaattgtaacaacaatgttgcctcatacatcggatacgacatcaaccttccgactaaagacggtattcgacttggtgtttgaaaacagaaacatcatatacaaggcggatgttgtgaatgacatcatccaccacagactgaaagtatctctacctatgattaaatcgttgttctacaagatgtcagaattctctccctacgacgattactacgtaaaaaagatactagcctactgcctattaagggacgagtcattcgcggaactacatagtaaattctgtttaaacgaggactataaaagtgtatttatgaaaaatatatcattcgataagatagattccatcatcgtgacataagtcgcctcaaagagattcgaatctccgacaccgacctgtatacggtatcacagctatcttgaagccatacattcggacagacacatttcatttcccatgtacgacgatctcatagaacagtgccatctatcgatggagcgtaaaagtaaactcgtcgacaaagcactcaataaattagagtctaccatcggtcaatctagactatcgtatttgcctccggaaattatgcgcaatatcatctaaacagtatgttgtacggaaagaaccattacaaatattatccatgatagaaagaaaatatctatatgattggagaagtaggaaacaggaacacgacaacgattactacattattaaattatgaagtccgtattatactcgtatatattgtttctctcatgtataataataaacggaagagatatagcaccgcatgcaccatccgatggaaagtgtaaagacaacgaatacaaacgccataatttgtgtccgggaacatacgcttccagattatgcgatagcaagactaacacacaatgtacgccgtgtggttcgggtaccttcacatctcgcaataatcatttacccgcttgtctaagttgtaacggaagacgcgatcgtgtaacactactcacaatagaatctgtgaatgctctcccggatattattgtcttctcaaaggatcatccggatgcaaggcatgtgtttcccaaacaaaatgtggaataggatacggagtatccggagacgtcatctgttctccgtgtggtctcggaacatattctcacaccgtctcttccgcagataaatgcgaacccgtacccagaaatacctttaactatatcgatgtggaaattaatctgtatcccgtcaacgacacgtcgtgtactcggacgaccactaccggtctcagtgaatccatctcaacgtcggaactaactattactatgaatcataaagactgtaatcccgtatttcgtgatggatacttctccgttcttaataaggtagcgacttcaggattctttacaggagaaaggtgtgcactctgaatttcgagattaaatgcaataacaaagattcttcctccaaacagttaacgaaagcaaagaatgatgacggtatcatgccgcattcggagactgtatatctagcgtcgacatctatatactatatagtaataccaatactcaagactacgaaactgatacaatctcttatcatgtgggtaatgttctcgatgtcgatagccatatgcccggtagttgcgatatacataaactgatcactaattccaaacccacccgctttttatagtaagtttttcacccataaataataaatacaataattaatttctcgtaaaagtagaaaatatattctaatttattgcatggtaaggaagtagaatcataaagaacagtactcaatcaatagcaattatgaaacaatatatcgtcctggcatgcatgtgcctgccagtcttcagcaatcatcctcatcctcctcctcgtgtacggaagaagaaaacaaacatcatatgggaatcgatgttattatcaaagtcacaaagcaagaccaaacaccgaccaatgataagatttgccaatccgtaacggaaattacagagtccgagtcagatccagatcccgaggtggaatcagaagatgattccacatcagtcgaggatgtagatcctcctaccacttattactccatcatcggtggaggtctgagaatgaactttggattcaccaaatgtcctcagattaaatccatctcagaatccgctgatggaaacacagtgaatgctagattgtccagcgtgtccccaggacaaggtaaggactctcccgcgatcactcgtgaagaagctctggctatgatcaaagactgtgaggtgtctatcgacatcagatgtagcgaagaagagaaagacagcgacatcaagacccatccagtactcgggtctaacatctctcataagaaagtgagttacgaagatatcatcggttcaacgatcgtcgatacaaaatgtgtcaagaatctagagtttagcgttcgtatcggagacatgtgcaaggaatcatctgaacttgaggtcaaggatggattcaagtatgtcgacggatcggcatctgaaggtgcaaccgatgatacttcactcatcgattcaacaaaactcaaagcgtgtgtctgaatcgataactctattcatctgaaattggatgagtagggttaatcgaacgattcaggcacaccacgaattaaaaaagtgtaccggacactatattccggtttgcaaaacaaaaatgttcttaactacattcacaaaaagttacctctcgttacttcttctttttctgtctcaatagtgtgatacgattatgacactattcctattcctattcctatttcctttcagggtatcacaaaaatattaaacctctttctgatggtctcataaaaaaagttttacaaaaatatttttattctctttctctctttgatggtctcataaaaaaagttttacaaaaatatttttattctctttctctctt

SEQ ID NO: 5 - DNA, 182664 bp, Vaccinia virus
  source 1..182664: mol_type = genomic DNA
taacatatcgtttctttgtaggtttatttaacatgtacatcactgtaagcatgtccgtaccatttattttaatttgacgcatatccgcaatttctttttagtttaaacctgtggtcttgcgacggtataaccgtaagtattttacatcttgatactacgatatcattcttgattctaacgtcgtcgtaatgaacgtaacagtcgtatcttccgctatcttctaactctggattatgaataattaatttctttcccgtttgtgaatacttaatatcgtcgatattaatttccttattatctttataccaagttatattattataatgttttgcgtaaagaattccacagtataagtctatgccatacttatcatgagtacctagttcatatgtttttggaatgcatgaaggaggttttttaatatgagatctaactataccctgaacacagtcaccattctttgtagttacggtacacaaatacctacggttactgaatttagatgtatagttggctatccataaatcaccatgtttaacacgtttattagaaacctgtcgccgtctattcttttctagcctctcccatttaaccacatagtctttatatctgtgcgataaaagactgtcttcaataggaggacactttgcgctgaatggctctcctagagtggctatatcattcattgtgcctccgaacatacatgctggattcaaccatttagagtctttagctggtagagtatctctcattttattgaagaattctgtgatttcattttcgatgtctatggcgtaactgtggaatagcaataacaataatgataatgatacgaaatatatatgtaccatcattttcatcgtcatctttattatacggcactaaaatatttatataatatcagtttttttacacacatcgcatgagaaaaatacaactatactttggtaggtggatacgatatattataaagatcgttaattgtcagcatgtataatatttcgtatataatttctgaaggtagtaatgttagtagacaatttttatctgtgaaaacaggaaatagtttatcatatacctttgacacgtacatatctttataatatacattaaggtatctctcattcataatattagaatatattttaaaggacttatcgttattatatttttttaactcggtgaggtatcttcttaactttctcgaattatgacatcttaaaactgcatatagtgtagtgtctagaacagtggacagtttgagtaacattgtttctttatgacatttagttattataccatcgtatttatcaaacgacatgtattttgaaaatgcgtatcgatacgttttagaatcgcgattcttaacgtgcctatcgtaaaatgtgtcatctaaaagtatacagtaggatatgaatttctcaaatgattttatatcgaagataggtagagatggaagttgatccaccaacgatcttatcacattcttatctacaatatatctaagtatatacaataaacaatcgatggtatacggggaattttctttgttatctataatgagttggatagcgtgtttgttattgtcggttaacgcatttatatctccgttgatacgtataagataatctattacgtgtgtattattatattcacatgctacgtgtaataatgtctttccttcatagcgggtataaatatttatatttttaaacctattcatcaaataagttatcgaatctgccggacgtgtagaatatgttttgataaactcgaatacgattatacgacgctcatctatcggcatttctccaacatttgtttcatagtgatgtattaacataacaagaatatcgtgttgtatgtagtcggaagttatataacatagtataggcgttaatccatgattattacatattttgaaattcggattaaaagtcaacagcattttagtcatatgaatattattacacatttcaatactaagatacaaatggaatggtgtattaccacaattatctaacgcgtttagattagctccatgttgtataaacaaagaaataattcgcttggccttttttatcgttatcggttttctacactcacctggtttataaacgtgtgcgagacacaaataataataatgtaacgctgtatatccgtcttgtttaaagttaggatcgattcccttatctaataaagttgatactatgttctcatcgatatcctcttccttcaataacatgtaacgagattttatatactctagtagtaggttggaatagtctctatgcgataagtggtttttatctttgtctatcatatctatcactacatcatgtgaaatattacaacatctagtaagcaatatataaacaggcatacgtccgctactggttttcatcgttacatccactccatgatttaataatatcttcagtacatcgtttgtaaagtaattattatacaaatagcagtgtagtgcagtatacccagttacaggttgtcgtctgtttagatcatagtttttaactacaaaatcaagttctgtagaagtatggtctatattgcaatgactaaaatatgtatatatttcattctcttgtattttatgagttgattcgcggttgatatttaaaacataaatcagacgacgactcatttttatgatgctttgtggtaaaagtcctcatataattgtttaatattcattattatagacgattcccattaactaatctaacatctttgatatacccgtaaatatgtaaatatgatcctaaaataacacggattgtaagatgtctagaaagtttatgcaggtgtatgaatatgacagagagcaatatctcgatgagttcattgaagacagatataacgatagttttatcactagtccagaatactatagcgcggaaaaatacatgtgtagatatactacactaaatcacaattgtgtaaacgtacgacgatgcgcgttagactccaagttattacatgatatcataaccaattgtaaaatatataacaatatagaattagttagggcgacaaaatttgtttattatctggatctgataaaatgtaattgggtatctaaggtaggtgattcagttctatatcccgttatatttataacacatacaagcactagaaatttagataaagtctctgtaaaaacatacaagggcgttaaagtaaaaaaacttaatagatgcgcggatcatgctattgtaattaatccattcgtcaagtttaaactaacgttgccgaacaaaacaagtcatgcaaaggtattggttacattttgtaagttaaaaactgatataactccggtagaagctccgcttccgggcaatgttttagtttatacatttcccgatattaataaacgaattcctggatatatacatctcaacatagaaggatgtatcgatggaatgatttatataaattcttcaaagtttgcgtgtgttttaaaactacatagatcaatgtatcgcattccaccctttcctatagatatctgctcttgttgttcacaatatactaacgatgacatagaaattcccattcatgatttaataaaggatgtggcaatttttaaaaataaggagacggtatattatctaaaattaaataataaaactatagctagatttacgtactttaataatatagataccgcaattacacaagaacatgagtatgtcaaaatagcactaggtatagtctgcaagttaatgattaataatatgcatagtatcgtgggagttaatcatagcaatacgttcgtcaattgcttgttggaagataatgtataaaaattcttataaactcaattgacatggaaatgtaacaacatacattcacgttatactaacagtaactgttttactgatgctaggaatagtaaacgccatacacgtaaacgttgtagcatcttcttccttgacaggattaatgtttaaccgggatgtaataacacgtctcttatcggtcatatagattttatttgctacacttattctaccgtctccgtccccatcatcttcttcgtaatacataccattacttatccaaaagacgtctgcatccgttgtgggaggtctcaacgatactctacacgcaatagtcaaattactacctattgaagttacaacaccttctggtaattgcatagtaggatgtattattctatcccgtacctctaattttacaattctggttacgttatatgttttgccaccgtatatatattctaaaacacatgtataataaccagcatcattttttctaacatcttctatggtaataattccaggtgtccgttgtttaagtctcttatttctaaggcgtcgatgcccgctccatataatatctgcgtttacgttactagcaataaatgcattaatattgggacataccatttcgccagtagatctctcatttactatttgtggatacgagataaaatctatatttgattctgagacagacacgattgtcaaatttaacgacatcatgtcacagtaggtttcgttcgtggtaatgcatatataaataccagagtctgattgtgtcgggttcagaattagcatattgctaccattatctatcggtataattctatcattatccgctcctcgtttttcccataaaatatctaatatattatatccggatgatagcgtatttatttgaggacatggtaagattactggctcgttttctaactccatgaatgatgcaaaatattgccctttgtcgatacattcagacgcgttaaaagtctgaacgaatgaagaataaaaaaatatagaaagaaatataacaggtagtatactcattttattttatagtgggtaaaaaagtttgtttctgggaaagggagaagagaagaaagaagaaaatgtcaagatgtacaactcatcaattcatacgccggaatatgatgttataatccacgtaatttagcatctcaagcatcacaaacaatgcgttcagactgttactagtgggatggtcttcacctccccagtaagtagcagcatatgcacaaagtccgatgatggccgaaatctctctgatggttttttgctcatccggtatataacaacggatgatttctgcacaatctttgacatcatcccacggcatatgttttaccagctcgcgaatgtcgatgaacactaattccgcatcatctctaaaagagaggagtgtggaatacaactgtccagcgcattgcctgttgcggtatgcataggacgaccaataaatatattcagtcaaacattgtttgacgtcatcaatactggtcagtctgtcacatccacagtgctgtggtgaaaagacgtgggtactaaagttggccgtcatcttaccaattgcaattggaagaataacgacctgcactaataccacatgttttttctattttttaaaaaaaatggttaacaattagttgtcggagagcaatatctaccaacgaaaagaatttttccatcaacatgcctaatcacatagatgaacggatgatctacacagaactcatttgtaattgttgatgcacagtctgacaccagtgcacaagttgctgcagctgcttctgtatactcttcattgacatctatatacgttttgtggatcatagcgtcgacactcacatctgaattacacatattgctataatctccagttgaaccgaacacctctgtcagtcctgactttactagagtatccaccagattatacgagcctgttaccttaaacttgggaatgtgaacatcgataaacgtagcttccagagagttacaccatttcttaaaatttgtatctgttagattttgttctatggattctaatccatcaatcttgtctggaagaatgaccatcatactagtatctccaacatatggcagttctatgattgaaaagttgccgaatgattcctttacagatgcgtgattaaatgccttgccgtacatagacatcatacttacatctaccatttccgtcggagatacgtaaaagggataatcactggtaaattccttttcgaatggcgtcaaccattttgctttaaagtatacggcactaattgctaggagacaatggttcatccaatagtggattgattttcccctcagtaaagatatctacacacttgttgattgcatctatagtgcgacaatcagtgaagtcaacagtttgaaacttatcgccaatttttctcaaaaaggaatctttaaacacggcagaatatcgcccatatactttattcatggatttgaatgagatattctgagcgctaaccttatccgtgttctcctccgtttctacatattttgatagctgttcagcagtggatccattagctccataatacagtattgtcaatactgacgagattgacgctggagaaatgaatacattctctcctttcatagaagatgcgatttccctgaagatatccatagtaatcgatattggtcgtgtagcgcgatagagatagtctaatattaatattagatatccgtaacactaccacactctataaaaaaagaatataatttcaatcttgtataaacagtttacgtagtctgtcataattaggagtttgagaataatctaacgtgtatactaattctatatatctaactaattccagaggttcatttccttcaggaaaacagtcctcaaagaaagtagctataaattttttatattcttttttttgttttattacttttatactactttcgtttttccatggaagtttgccaccgaaccattctatcatgcaatatcccaacatttctaaatctcctcgttttgaaactgttgctccaagatgattgtctacacacatataattgatatttcctgaagttatcatgtcctcgttgtaatctatatgtgagtttccactcttgtatagtttgttagttctagaatagtcaattagtgaaagacgtttatttctaatcagtatattcctcggttctatttttccatgggtaaatcctcgagagtgtataaactctaacgtgtttatcatagtgacacatgcttcgaagactgattcagtatcctttggggcgaatactcttcccaaattctttataacgaagaacatataatcatcggtttctccaattccatacagatctggaatagccaaatactttataccacgttcccgtgtccagttgtcgatagtcaaaggatccaatacagatatatagaatcgtatttcagacaacaatggcttgtgtgatttgtgatctatcttcattacgtaattgtagaacgaactagtgaaattttttctgaccttatatagtattgaattaccagaatataaagtatttccgataatccatttcttgccatcgttatcaaaacaatacttgaaggattccatgcctgctatgtaataacgagttgttttttatgttttgtatcgattataaaaattagtagatatgatctatattcctacatcgtgacagatacattctataacttctttatcaatggaatcactattactactggtattaataacgagtgcttctctaatatattcattgggatgattcttgttaatgtttttattattttcaatttctacattttttagtatttcttctttctctctatctatttcatttatgatatcttctacatttgtaacatctgtatctgtatctgtatctgtatctgtatctgtatctgtatccatgttagtagtaagcaataaaactatagggtaatactgctatacataaaaactatttatattttcattttcaatcaataaggagaagttgataatgcctttatagcggggagacgatcatgtactaacttccatgcaccatcatacttttccacatatccaatgtccttactaaatacatagaagacgttatttagtttacacaatgatgatatggatatcttataaatagtatatgaaatatcaaaccacttattcgttctaggattgtaacaagatatctcgttgtttttctctaaattaccatattgttcggtaacggatagacctccggcaaaatataacattccaaatgtcgagtcgatgccgtgatataccctagccataggcatttctataatcgaccattgtttgtctttataaatgtcaagtttttccatattgttaaccacgatcgtgctattagagttatttatgaataatccgccagttacgaaaatagtattattaacggaaacagcggacacattgctttttttataatttatcggtgtttcgtatatccctgaatccattgccttcagttatcaatccttcacttgcagttgggagatgaacactgcaatcagttctttcgggataaaaatctttggcaattatacacaaccctattttcaatccccatgtttcctcttcagtcttctcacatcgtctaatagacatggagtagatgatagaggggaacagaaggactataatcagggacctcatcttgaaaatggttagagcctataagggcgttaaccagtgtataatatgcagttttatttcgtttttgtatcattaataaaaattagttatgaatatttagtcaagttaagcatgctaagaaaagtggtaacatcatttgatgtgctaccgagaaatttagttaaataagattgagactgtttattaaattttctcttgataactctggccattttgtccttgaaattgggaacatcttctttggatctaattgcgcatgtatatacactctttttaggtgtcagacatactttcgaactccatggagtaattttttcgagaaacccttctgtggctccctgtgctgtcacgcacactttttctgttgtgacaaagtctatgctgcaacctgtagacgtgcaatcgtagtcatcgatatcatatggtactggttctttagaatctccgaatgtgaagttagccgtatacaacaagtagatatcacacatgtcaccgcgtttgtaaataggaatctttttgctacctctagtagcatacggatgctcgatgtacaaattgatatggtcgtcgtattcagttaatgttacagtcggtggtccaatttttacttcgacgcatagtcccgtacaatactcttccactttataatcgccttgttcaaatttaacccagaaagatacgaaatcattctttggaaatgcggatatgtcgtatgttccttctggtacatttgtatacattgtttgccacgtcttgatgccataatttttaagggatatattgtatagaccatccccagtccattcaattttggaatcaaaattgacggattcaaacttataactagttattttagcatgtatactattaatgaacaaaactgcgagaattataatatatctcatggtgttgtttgttatttgactactgtcactgaagtgataatatattttaaatttttaaaaatcatattttgaataatatgtattactatgtccatgacgatcaaatatataagtagatccaattttaagagtatgttttctcaatagagtatcatcgttgatcatacttatttcatattttattcctttatagcattttccctctgcagtaatagaatattgtcgctcatcaccatcatatttgtgaatataagggtacttatcataatggcatgataatttggtagatattctacacgtgtgacctctgcgttgaatagtagacgagtcaatggtatacatatcaataattttatagtcgtttataacatctatatctatggaatcaaatccgacgtcgcatgactctgtaataatagaaattgtgtactctttaaaatttaacaccaattcattattatcatcagtatatgaattttctatattatctactccatctatatagagttttacactcagtttattaaacggagtgtactcattattcgaataggatgctactgcacctattacaaataaaaacgttattagttttttatacatttaaaatcttaaaattttaactagtatattgaaataattatttatacaaactaactagatgcatcaacagataataacaaacacctccagcgatcgtgccaatagtagttagagatgcgtatccgtacaacttgttaatcatatttctacggatgtatataccatcgtcgttaaaagcgcttctatatctctcattagctagaattatagatacgctattaattatatcatacattagttgattgttgatactatttttattgtaatcgaaaaacatttccatgaatagtattccggtgcccacacatacagtaatatcgcgttcattcatcattataccattaagtgtatccatcacccattgtttaacacgtgattcatttggcatagtacgtactatatcatcgaacggtataacggcgcatcttgtaaatagcctgtatatattatgtaatatggcgttacttcttccatacacaataaatctcttgttataatagtgcctgagtaaaaatgctctaacggcatcgtagatatcaacatccactgaagaagacatctcaattgattctagctataattctttaatcttttgatacttgttcgttattaattattaattattttaacggatttatatttacggtagcaatttatggaacttatattggtcattatttttgtcacaggaacaaactaatactataacggagattaaaaatatgacgcccataattgttaacgccactatgattatatgataagttgcttctaacgattctatttcttgttcatattgtacaacgtctttcgagagtttgctcaaatctgtctcatcgtcgggaccatcatccactggatcaaatttttcgttagatcgtacacatgttgggagtatgggattccatttaccgtcgatacatgtggatgatggagatcccgttagtataaaaccacttttacaactaagatgtataacgccaccgatagaaaatgtagatccggaaattaatccgttagatagagacggcatatcacatttttgttgacatgatggaataacattccaagaattagctgtacaacttatgtacgaagcaccaataacctcatatccaacatcacagttgatagttatatattccccaaatgagtatttttctttaactggttgacacgatccgtgttctaattgaagaggttgacattccgcattaggacacgtaacagtatcattccaagaagtatttccatttttttcttcgcaacgaaaatattttgtttcgccgttgcaacttagtgtcatggtggaattcacttcgtataatggcttatcatataattcagagacataatcagaaactgtgcacattttcttgcatggattttcgtatttccatttatctgtttcgcagacagcatttggatccaaagaatgatatccctgatcacatgtaaatgtaactttctgtttatcattaaacgatgtttcggtagacgttaatttagcgttattcatagtgggtacagtacatgttgaataaacaacagcaggtagtacgcataacaacgtaacaacggaaatcgttttcatttttatttatgagtgttaaaaatagtatacactgtcgagcactaaaaggaaacaatgatgtagtgtgattttatcctacttagattttatattttaatagtgtttataagatttttagatatgtggacagttcgttatcgttaaagttttccaatattttatattttatttcgttaggaaaacacgaccatttatctccaggatccagcttcttggataatagactaattaatctctgacgatatctaatagatgctatgatattacgtacacgacttccgtatacgtcgagactagtgcatttcacgaaagaaggatgtttaccgtatctcattaaagtattaatgtctttgatacaaaaaactaattggaatacagttttattttttatataacatctcttcatgatatctatttcatcgaaacatcttaaaatataccatttatattgctgtagcgactgtacatctataagagtatcataatcggtcatacacgcagtatattttatacacattttcaataaatctgcattatgctgtttatgtttagtaattgctatcatagactgtatcataattttcaaagatggtcgtttagacaatagtacttccattattattttgttgttgtttgcgactgcttccgaaatacatgtacatccactagtagtaatcgtctcaaaatcaccatttctgtttaatagatagaccaacgtattatacgcattataactgacagcgtcgtaaatagatgtttcgttgtatatagtacgatagttaatatcaataactcctctggataatagataatctaaagattcaacagcatcaaaaattattaaatgacgaactatatgttcattatctatttctaactctgtgtctgattccaaatatagttttataagcgagataccgtgtataattccacaataaaatggagtagttccgaatttattacgcgcattaacatttgctcctttagaaattaataactttacaaaatcatatttattacgacatgagacataatgaagaggtgtatatctattaaagtctacagagtctatattagcattctctaaacatatctcaaacaattccacgttgttgatatcgtgtttacataataggataaaaggtgtgtttccgtacgtatcttttttatctacatcggatccattatttaacaatatcttaattaattcattgtatgattctgattctgatttcttatagtgatatatacatctatgtaataatgtacaaccgtaactgtcttcggcatctatataaaatccatgatttattaaaatacatatatagatattaactgtatctgatatataggacaaaaaatgtcttgttctacgtccattttcaagcattagtcttatcctattatctggatgatcattattaactaattgatatacatattcttttatattaatggatgatgataacccgagattgtgtataaatgacccgttcttattaatatttaatactctatctagaaaaaaaattataatattcgtattagcatcatccatagaataaatatgtagaatattttccccatattctaaaatatggaataaatttggcaacctagataaaaaatcaactattgttttatccactttctcgtatgttcgaacgagattataatcctgtattatatgggatgtggaaaaattggaaaacacgcgtgctatataatgaagagataaatatatactccagtcaagtatttcctttttaaaaaaatccatatataatttatattctgtaacatgttatcccttttcaattaacaatgttagtttataaaaaattaaagaagcgaattaatgattaatagatgttaagaactataattacgatgtattaataggtatatagttagttggttagttaaaaaagagataacagttactaattaattgttagttattgtctatatgatattacaaccttattatttgttctctattacattaattaaaattttatatgtgacacccattcatctggagaatacttattgataccattagtatccatataccatgattctggccaatctgcaaacacagcacaacagcatctttccactttgatagcgcacacgtatgtcgaggtagtctcatccccaggtttatataccttgatgaatcgacacgtgtacttgatgtcctctttcttctcacagaaatacacaacacaaagtcttttgatatgcttttctatatcattctctactagtctgaggtagtcgtaacccaccgtgaatccaaatactttgtgtgtattattatcaactccaatgaacaaatatccacccttggtaaaagatgagagtatagaaggaagctgctgccgtatacgtgttcttagttgcttagctgaaacagatgtatgtttaacattaatagaattaccaaatttgactgattcaccagcctgaagttctgatctattgaagaactcctctgccaatctctcaattgattcagtgtcttccactccatctggatattcaaattcctgcatttctggtctgggactccatccacctgattccttcagttcgctaagatactctagagcttccatggaatccatttgaatgcatgatcccatagtcttcatgtacaaatttgtttttacagtactcggtataagattttgattagacaaatgcgtatgcacataacagcattctttaccattcacaatattaaaatgatcatatacaacagaccacatatggcgtatagtttccaaacgtttcatgagtacattattcacgctgtcttccagagaggtggttacctcgatggtgccgccgatatagtagaagaaagattttctgtatcattctccccaagtttaacttttaccagatttgggatcggaagcaccgcaccctttttgaatctcattttcataatttcctttccatgtacgtccacagcagtaacttgacagatacaatctcctatccagacgtggtaatcaattataggtcctggactaagtgtactcatttctttggccttctctttgatagtagaataatcatgttgaacttttccatatacagcgtttcctgtttcaagtacgtgatgatgaatccctactccttccaaacacaagtctagactctcgtacccgattccgcttagagcatagtagtttttgtggcgatatgtgatgatagagatttgatttccttcttgatcatggatcggatctccaatttgtagatattcattgcactcaaacataggcaacagtgctccaatatatctcttgttcacctgactgtaacaccacatatatttgtcttttacaatgtcatacttgttattataaactgacacaacagaatatttcctgacatcattggcaacagtcgatgatattccaggaaaggcatgaagattctcgtcgtacccaccgagagcgtgtgcgtaaaacatcgccatgatttcggttgtacacacgagatcaataataaattaagttattttttaatttttatcgacaaaaattttacatcgaccaaacaccacacttaataatatacaccctgcattaatatgtgccgaaactcgtcgtaattgggttcctcaaaatatgtcaaagagtttaccatggtaatatattgcagcaattctctaggttcatattgcaaactggtcattaacaaagttgcagtattgttaacatatttctgttttgtggcacttactaatgcacaattctttgtttcagatatcttagtccatggtaagatacctcccaaccatctaatcatacaatatccaagtgtttctagatctccacgtctagatacaacgtatcctttatgcgaatctataggtgtaaattctagagtaccgttatccattttatttggatttcttataaatggaacatgttcgccgttagacatgaatttagaaaccaatccgtaatccactagatataatttattcttatctatttgatctaagactatattactcgctttaatatctccgtgagaatatccttgctcgtgcataaattgtatggtatttaagatttcgattccgatcaacatcaccgacctttttggtagtctattattattggctctgatcaccgcatctagatctgcacctaatctattaattaccaagaatctatattccacattaatggatttgtatagaccaaatgccttgcacgtgataagacctacgtgctttatattgtgagattttttccattcttcgataacggatggtttaagtactctagtataaaatgcctgttcggtaaataatgatccgttagctttgggctctatttttactacataattattgtcattagtagtataaatactaccaaatccaccttttcctattaatggtccaacgacccattgatttttgcaattgtcagttaacacaagtccttgaaagttcataatgtgtgatctatctgtcaatgaaataccattttaaattttaagttttacgtggtaagttttaatatttaactaatacattagacgttgaaatagacacatataaaaacgagttatattattaattatcaagttttaagtcttaagtctttaattagtgttaaaatacattctaatacggtcctgtagtatctgaattaacttactatatgctaaattcacatcatcttcaataataatagtgtcgaatagacctgcttcgttggcctcatccatatccgtttttgccaatatcacgcgacgatgaatctcatcgttagcttcagtgtttctacaacgaagcttggtctcaaccattttaagagaggtaggtcttatatacaccgagtaaggcattaggtacgtatttttaagacttctaacgccatcgatgtttagatccatcacacaaatacgattattaatagccgctgtattcacagctgttttagaagttccgtaaatatttcctaaaaactcagtatgttctagaaagtttccggcggctattcccttccagatggcctctctgttaacgtaatggtaatcgacaccttctcgttccataggacgaggaaatctagtggtatgggacaccacaaatccaaatatattcccatagtcttttggctatggctgtctttcctaaaccagatggtccgctcaatatgatagattttactatcccagacatttatgtaagtcaaaaatctagactttgttctctgttttgtatttacgtgaacgtttattacatatataatacgtaatacagaatattgccacggccgacaatataattaatgcggtaataccaaatatttctacaaagtccttggttttataattgctaatagaggttgtactaccgcctacagtagttggtggtactgtatcattatcattgtacgtatcatcggtggttgatttagtagtgacaattccagatgatgtacttactgtagtgtatgagacagtgtctgtgactgtatgatcttcttctttatcagtaattggttccggagtctcgtctgttgtggattctccagatgatgcacttactgtattaatgctatcactagtgtatgtgacggtgtctgtatgatcttctacattatcagtaattggttccggagtcgcgatttcgaataccgacgagcaattaaaattatctatatcctctggtttctcagaactagtttctggtgaatgtgtagatccagatagtattatgtctatagtcgattcactatctgtatttacaatcaactctgtggagtattcttcataatctactttatcagtgtcatttgtagttgatgtcataaagaatgcacatacataagtaccggcatctctagcagtcaatgatttaattgtgatagttgtaactagatcatcgtatggagagtcgtaagatattttatccttggtataattatcaaaatacaagacgtcgcttttagcagctaaaagaataatagaattgggctccttataccaagcactcataacaacgtagtcatttgtattatttcgattacatgatagagttgcatcatcacctatttttttagatgtctgaggaaaaggtgtagcgtatactaatgatattagtaacaaaagtattggtaatcgtgtcatattagtataaaaagtgatttatttttacaaaattatgtattttgttctatcaactacctataaaactttccaaatactttagaaaatcattcgtgtactgtgttttttccaatggatatttatgtttaatcggttcgcatttatacattatataattgcgtggtaacacgtgaccattatccaatgtccaacaatctttttctttatcgtatgtttcagatgtattagtttgaacatcatcagatattcctcctcctacatataatttattatgcgctgaccatagagcgggattaattctaggaatatttaatgatgataatttggtccattcatcatatatcgaattatagctaaggactagattcgatattacattaactacactactattgttgtaacctccagatatataaatcttgccatcatgaacaatcgtcgacatattggacatttttattggaagacgttgatgcttcatccatccatcttctgataaactctctagtgcgtcggtacacgtgtcacctttaacgattccacccatgacatatattaatccgtttaacatcgcaacccccatatcacattttggttcgcgcattttagcatacttctgccaatatggttttgatggcttccatctatcaatactagatgtcaacgatgaatcctgatcgcgtatgccgcctatacaataaatgtattcgtcatcagccagtcccccacaattagaacgaggatattttagctctggtatatcatatatccaagaatttgtacatgtattgtacgctataacctttgaacttctatacggggactgatcatatccacccatcatatagataatattatccaggacggccactgcgaaactacacctatatctacgtgaagatatcatttcccatgtattttttttatgattgtagcagtttatggaaatcttatcatgcgaattacttataccgatagatatcaactcgatgctatggtatctaggaaatgattcatccaagaatgctatattgtttaagaatgttatacattcgtagattgaactaaccagttgatgactataaagtgattttataacttgtggggaaagcaatgatattctgaggcatttaagtaactcgacggtgcatgattgttgagtactctctaaccatttaatgagaattagtggtgcaaaatcctcattttttatatttaacatatcatcgcttaaaatttttatcattgattcctctgttaagtatttaaagttttcatcgttgatgagtctcaaaatattttgtaatattgtgttaaacgacgctgattctattttcttgttattatatttatcagcgtatatgtagaaatcgatacagtttttagaacaaagatttttaagtatgtaattttcacactccgtaatagcagatccaatttgtaaaaaatcagcggttgaaagaatatatttcacgttatcgttagttaggctcaaaggtatcccataaatataatcgatcaaatcgtttacgctttgataatctaaatgacttagattaacttcgtattcattagaatcgataaaattattggaaaacagaatggaaaaatattcggaggctccagataggatgagtttatgagcgtttatcctttcatcattaataactatattaatatcacaaaatcgtccactatttctaaatccattaataacagcaattaatttactgctgctattcatgatggcgttgtaagagtatattataaattatatttttatttttatgcctgtagattccttataaaaatttgaacaaaacagattattacgaatttatcgtgttagcaattataagttactatgccataagtttttatattataattataacaagatcgtcaaaagataagtaattattaataggtcttcatactgaataatacactaaccaagtagcgatataatgtatggtaacattatcatcaaaatcataattaattacatttagatagtttgcatggagaaaatggatcaagtctataattacgtaggtagttgcaatattcaccaatacagcacgatttacaaataggatttccttgttcatctattccaccaaagtatccgcatggacatctcctttttggtacacaatttcaacaatcttcagtctgtgaagaatcagtagcacaataccaaccaggaagacacgaacatttactgttctgtgttccggtacactttaccttatcaaatgatcctgttgggcattttctacattgatgacatccattagagtaattggggattgcggtatatgtatgaggtgggcagcgttcacattttgtgttatcgttaccattacatctgaccttggcaaattctccaggtggacactgattacaacattgattatgcctcttatcaagatattctccctcgtcacatgccccgtttaccggagcgtgtggcagtgacgaagtaggtatatctgccgtagccaatgtagtaatgtaaaaaatagtacatacagtcagcaaattctttatatccatctttttgatattatcatatactacaataacaaaatcttttttttaaactttaaaccaccatcaaaaatccatgtttaaagttatcagattaaaatatattttcgaaattaatagctgtatatctcatccatcaattttagatttatatgttttgaaaaacactatcttactcatactctagtttattatgagaaaaagtaccttataacacataataatctgatagatagaccatcgaatgtattttttaactattacagaaaaaataacaaatatggaatacaaccttatatatttttgctctcattaacttttaactttctatgacatttccacatacactagtctattctgcagtatagattttatcttatcaagcatgtgatcattaataaacagtttaatcgctcgtaaacaatatttccatctagaaaacagtttctcatttctccaaacatctaccacgcatgcacacaatcctatcatagatatgcaatcgtatacagtaagtttgacgatatcctgtttttgtacctttatataatctataaagttatctgctccctcttcagaatttaatctaagtttctgcttgagttcttctatagtaccgaattgttcttccgcatcattgtcgaattttttaatttcgttaaagagtcgtccatattttattctgaggcctaatagacctctgtacataaaatattcctctagaatagtaaacatctcatctctatctaacaagtcatcgtactcaagataatcaggtttgataacatcagtagttttttctttttggagaggtagatatttttttctttcttcattttccctcctagtagtcaccgtaaatttatcaccagaaatactaatatctatctttatgtccatggtgatcacacaaaatagtatgaaatagattggtttaaaattatgttttttatttcgtgcttaaaaaaattatctagaggctataccgtaaacgtagtagctatatcctcgtctcccgggaatgtagtctcgatttcttattaaattaccagccaccgaaagagcaatcttaatcatgtcaggttcatatttccccaacatactagatccaaatttgcctacatcaggtaaattcatcataatacaatgtctgttcatatcacacgatgatccattgagcatctcatctctatcaagaatcctaatctgtggttcaaaataacagcatctacactcatcgttaattgtagtattgtctaatatatttttgctaatatttgcgtaagttctattatcagctatcgcatgcatcacagatccatcaacaaccatatataatatagaacaatagtcggactttatacttatgtaaaacttgaaccaattggaactcggaagctcgtcatgtagacgctggtgtctagatataataacattattatcggttacacttcttaagagaggtgccgcatcgatagagaaatcaaacaggagaataatcaatgatgcatttcctttggtaaaaaaggaaacatccatgggaagaatggctactttatatgaatttaactctatacacgcacacgctttatcagatgagattaatagttcacaaacatctctatcctttcctatggatataataacaggaatggcatctttaggtttaaaataattatatacaccagtaggagtcttgtcatcgtcatctatctttatcaaattagcaaatctggatattcttgatacattctttttatacagtgaattgcatacatcggataccgcattatccatatatggcaaatctgcaatcactgtattgtttttagattgtccgtcgatgtgaacgttcttaactctttcacaacatggtttaatcatgaaatcattttttatatgatttatttcctcgccatgttttactaacgcgtttagacagtatacaataacaccatccatggcgaccaccaactaaatggtgttattttaattttcagtttgtatgtaactattaagatttagtcaagtttactaaatcgtttagatgagtagattctttccacgttttatcctctcttatcctagtaaatctaggaaatctaatggatattccatttgcggtatgggacttggaagatgtaaactctgctcctgaaatttcccatatctgagattgttttggatcctctactacaaaatcgggaatatagattttattaactactaaccactctggaatttttttgggatccttgttaattttaatcatctttaattggtcttgcaactcccttaacgtattatcatcgtgtcctgaacacttggtaaccgtcttccatttaccggattcatcgtcgtaacaacccattagaaagactgccatgataccaccctttgctcctttaccatagtaagcacctagtactactaaatcggcagaatctgccatggaaccctcgttcaaatagtctcgctttatttttaaccatcttctctttcccggttcgtatactccattaatatcttttaagaccaatccttctaattttctcgttagtgcatcatccaatacgtcagttaactgagactcgttactaatattcgtcaactctgagaatactattctattgggtatttcaaccataacatctttgagaaaagatcttcgttcgtacaatggaatgtccgtcatatcgaatccatcaaagtacaaacagtcaaacacgaacaaacacatgttagagtttttatattctttctttttgtgtatacctaaacttccaaacgggagcggtacattatgttcgtctacaagaacaatttcagaatccaatacgatagacgtagcttttttaaatgctttcggtatgtattctttgagataatccactttatgagagagtactggtttcatgtttctactaaagaaggcaaactcgttattatttttatgaacttgtactctttcaccatcgtatttaacttccgcaaacattcctgatggaaattttttaaacgccttattgacagaatcacacgattccgctaacatgggattaattggagtcataacagaaatagatataaagtctagattttgtttagatgaattttctattatctctttcaagttattagattttctaaaaacatcataggcatgaggactaatagcgttaagtacgtaccgagggcccgctttaatttttagatctttatcaataagcatgactacacattttaaatcattacatgtacaaacagatgctacatcagtcaataattttatttgatgcaattctttagttacggatgataacgtagttaagaaactatccacgtcttctaaagttaaaatgcttttatctcttggacggatttctgtgttttctttgaagaatgtactaatagtgtctcctatatatccgtatcctaaatcttgtagcatatcttcctgagattgtttaaatattatactatataattttataatttgtttatcgttcatgttataaattctatcgtctaatccgggaagcaatagcttaatgatcaaatatttatcatccctatctgttataaagtctctaattaatttagatttttctttatatcctgatgcgtgatatatagcacagcataattttctaaattcacgaaaagacgtcatttaataaaaaaagtatttttttttaatattttcacaaatatcgttcgcggatattattagacaattgtagtatattcttacgtatcacttgtttaatatctatatcggctattctggaaccgagtacttcggcatacgtagttttaaaatctggattattcattatatattttagagtaatgatagcatctactatattttctaggttatccttataaaagctcataaacttattaactatacaatcgataatttcattgtcgtctaatgaattaatcaattcggtctgatagatctcttgatctataatagtatatacagtatctaggaaagagataaatggattatccaagtttgatctacacatgataaaatttacaatgtccttgtttaatatatcattatctatagtttctatcttggcaataactaattgagatattgatgcgagttcggtatgcatatcggacacgtatccgagtactgattccaagttgccagagtaatatgcttcatccatttataacactgtactaacatctatttataaaaaatgtaatttcactattacatccacagttgccccactggtccagtaaccgtgtgtatagcctctataactatattcttaatcaactccttctttacatcttcctcgaattcagaagaaataatttgccaatgaatatctccttcttcaatcatttttttatattcttgtaataccttttgttggaatgtaacatcttcataaatttcctcgccgacgtttctattaatttctttgctaccagattccaagaatataactaagtcgggtttaggcaatccagattcataactcttactgagagtcattgacgcgcctttagcggcggcatacgctactccagagaatgcgtatctatcaactattaaagtaattccctgttctagttgttcttgtataaaagatgcaaactcccatctatttgcacaaaataatagattaactatatgatcattataggtttttttacgagttagatagtcatctatcatctttccagtgacagtggatctctgaggaaagttaagatattttatcgtgtttgccggtatagattccatgatgttcatacattgtgttgtttttccagatttgtccaatccttcaaaaacgattaatgccccacgagacatttttgtaaacctaacatattttttacaatttatgcgtataataaaactgaaaataaatatatggtcatccgagacgattaggtctacctttatagatcatgggtaacaaaaatattaaaccatctaaggaaaatagactgtccatcttgtccaaggataagatggattcatttaagagaggatcttgggcaacgtcatcctttagagaaaagtcgcgtgcaaccatccaaagattttcatctcttagacgagaacatattaaagtagaccatcctgacaagttcctggagttaaagagagggatatataaaataattcagaaatcgtcgtctatagatgtggacaaacggactaagctcatgtccaacataaaaacgatgatgataaatccattcatgatcgagggtttaatgacatctttagaaaacttggatcccgataacaagatgagctactcatcggtgatgatattgggagaattcgacatcatcaatataagcgacaatgaggcggcattcgagttcataaacagtctgttgaaatctcttctcttgttaaatactagacaactaaaactcttggaatactccattagtaatgacttgttgtatgcccacataaatgcgttggagtatatcataaaaaatacatttaatgttccagaacggcaactgattctgagaggtcaatacctaactccaattttcagtgatttgttaaagtatgcgggtctaaccataaagtcaaacatacttatgtggaataaacagtttatcaaaccagtatctgacctctatacatctataagactcctttattgtgttacagtataatttttttacagaatcatataaggtgattggaatgggataaatacaacaattatattttttatcatatccttcacgctataaaaaaaattatacatccgtttccctgtcggttacggcagaacatgtagacgaatcatcgtcttcaaaataatcaaatttatcctctatgctctcagtgtgcccgcgtagatacttacatagattgtatcgtagtctagatagctcagatattggaatactatcagatatatgttcggctaatgccatacacctatactttttatttgtcaattcccaatgtttagatactagactagatagagctactactattctagaatcacaacatatcatatcctttacaaagttgacaaagtcaaatagtcccgaatcggagtctactttaagtttctcattaaataatagatcaatgtctccatactgtttaatagccaaatcatctagtgtcatcaatgccgaataaatattgccggatatagtatttctgtgtcttatatattctgctaaaatcagtttaaaactatacttattatacaagtaagtcatactaaccggcgtattaaccgcgcaaccaatattagtttcctctggaagcacccctcttatctctatggagtcattatgtctattatatgaaataaacgtgtcaactactttgtccctatcaaattcgacagtgtagtgtgtatcattaacttcattacgtatgactaatttattttgctgagtagaaaagtaaactaatgcatttattgttttagacgcattaactgatatatcaaacgccattctcgttaattgtaagaaaatgtattatcttttcatttatgtaagaaataccaataactccacacgctaatctctgatcattttttgaaatagataacgcctttccaataattgtaaatatatttacatctgtatctaaataaacatatgctacaccatatctgtttacaaagatgttaccgataaatatttctggactgcctatggaatcacatccttgactaatatctccgtaacgatgaattatcaaactatacgttccggattttaatccaataactgatcctaaaactttatcttttccatgaactggttcaaagtaaataactcctctgatattatcgtggtctattatacaaacagccattatttagtaaaatagaataagtagtctgatattataagtggcagcaatggccgtgtacgcggttactggtggtgccggatttttaggcaggtatatagtaaaacttttaattagtgcagatgatgttcaagaaatcagagtcatagatattgtagaagatccacaaccaataacctcgaaagttaaggttataaactatatacaatgtgatataaacgactttgataaggtgagagaagcgctagatggggtaaatctgattattcatacggctgctctagtggatgtatttggaaaatacaccgataatgaaatcatgaaagtaaactattatggaacacagactattttggcagcttgtgtggacctaggaatcaagtatttgatctatactagtagcatggaagcaataggacccaataaacacggtgatccattcatcggccatgagcataccctttatgatatatcaccaggacatgtatacgcaaaaagtaaacgtatggccgagcaactggttatgaaagccaataattccgtaatcatgaatggagcaaaattgtatacttgttgcctaagacccactggaatttacggagaaggagacaaattgacgaaagtcttttacgagcaatgtaagcaacacggtaacattatgtatcgtacagtcgatgataacgcggtacatagccgggtatatgtaggaaatgctgcatggatgcacgtgttggctgcaaaatatatccagtatccgggatctgagattaaaggaaatgcttacttttgctacgattactctccatcgtgttcgtacgatatgtttaatcttctattgatgaaaccattgggaatagaacaaggatctaggattccaagatggatgctaaaaatgtacgcgtgcaagaatgatatgaagagaattctatttagaaaaccatcactactcaacaactatacgttgaagatatccaacactacatttgaggtgcgtaccaacaatgcagaactagatttcaactactcccctatctttgacgtcgatgtggcattcgaacgaacacggaaatggctaaaagaatcagaataagtatttttttaaaaaaataattgagtagggtatcaccactacaagagtaccgtaaataaaaagtatttattatatacttatttttatagatagtattacgcgctttctacatccatatcatcgtcatcttcaatatcgataatatttttttcttctaccttgacatcttttgcctcttcgacagcaactgattgcgctaataatacatccttttcttttttggtgtaacatcaatagttatcttttccaagttatacgatatggtaacaacattaccaatttttgaatcaaccgtaattttgattttatccatttctaatagcatagcataattaagagttcatttttatttttttaaacacgtatatggtcactatcaatgtagacgctattagcatacatattgcagtaaaatcatagatgccattatacttgtcatttatatctttataccatataatagaatcatatcctattataataatacacttggaccgatgtagagaataagtcttatgtttagatgttaatatagtagatgtactcgttgccaaatttttaatgagacacgatacatttactgagcattgtatatcattatattttaagtttcctgataatgagacaatcaaactaggattaagtgaaccatatttgtgttttaaaaaataaccatgtgtaaaaaagacattatcgtctagttcatctacggttaacgtgcgattaataaaattatatctatatggaatatgcggattatattttatatttactacattatagatcctatcaaaatacaaatgcccataacataattccacatcctctgaatgaaatctaaaaatcgatgagctgtatgccaataccggcattattgacatcgtcaatatggatattatccatttcatcatcatcatttaaaattgacactacatatgaatattactttttattttaattaccagttgcacgtacacgggtagcgtgatctctacacgttctatacacgtcacgtctggatgttgttggcttacccatcaaaaatataagtgcggtatgagttctcgctataacgatcggagatacaggggcgtacccagtaagcaactccatagcatacgtgttctcatccattagagagttagtatatacaatacaatatttctgaccaataagaggttttagaatattacgattagtgatgagaggaataatttcacccggattaatcttggcaaatgttctgttaggaatagcagctagaacattctttgtagtcttgtaatcaacgatggcggcatcctcgaacttattattttttgagatatcctcgataattttatgccattcagccattgttatttattatatatgtttttaataagacatctattggaataaacttgacattagcattttattcttattacaaaatataaaataaaatatacaatccaatactcacataatccaactcactcgaacactatttttccaattacgataacaatattgcagaatgtactcgttattatttattattttgatgtgtataccatttagttttcaaacagtgtatgatgataaatcggtatgcgattctgacaataaagaatatatgggaatcgaagtttatgtagaagcaacgctagacgaacacctcagacaaacaacgtgtgaatccaaaatccataaatatggtgcatctgtatcaaacggaggattaaatatttctgttgatttattaaactgttttcttaattttcatacagttggtgtatacactaatcgcgataccgtatacgcgaagtttgctagtttggatccatggactacggaacctataaattctatgacccatgacgatctagtaaaattaacagaagaatgtatagtggacatttatttaaaatgtgaagtggataaaacaaaggatttcatgaaaactaacggtaatagattaaaaccaagagactttaaaactgttcctccttctgatgtaggaagcatgatagaactacagtctgactattgcgtaaacgatgtgactgcatacgtcaaaatatacgatgagtgcggaaacattaaacagcattccattccaacactaagagattattttaccaccaagaatggtcaaccacgtaaaatattaaagaaaaaatttgataattgttaattgttatttttataaaaacaagaacggtacggcgatatttatttttttctaaaacatctaaccgaagtagtggtatgataaaaatgtagtgtaattgttatatagtgtaacacgaatgcagtttgggagtattcgttgtactacaaatatatttccattcttcgtggcattcttagctataaaattatatggggttgtctggtttaatatttcggattctcctacccaatatccgcgtctaatgcttcttaaaaaacttaactcgtttggagtctctatcttaattagatccgaatttggatttagagctttgcatgcattacgtccttcctcccaggtttttcgatcagtagataaatggatacatttattattatagcttatccagtcagtaggacaatcttctctaatatatgcatcttttatcgttttatctattgatggtgtatgaactaatttacgttctacaacttttaatagtgtcgctgtaaaaataatttcgacaattagaccgcatattacgcagcaagcataaccagcataatctgtcttatgtttgttcattgtcgtgtggtgtactcgattaagattacattttaagtatttttttcatttgtggcattcctactcctatccctatatctgctataaataacggtttcgaagttaccattactgaaaatagtcgcgcatcgacttgcgagctacgagtttgtttagattttgtatcgaacgaatatatagaattttcttttatgaagtatattctatattcccgatgttcattttccttctcctttatatcgaaccatttaacaccagacggtccttcgaagataggttggttagataaaggctttataatatcatctagtacattatatttttctatgacttcaaacgtggtatgtggaacaacttttccagctggtagacatataccaggagctggagacggcaattgctttgtatatccttccaattttgacgtagaaaaagattgtttaatggtattcatagaataggtacataatgcggactatcgaagaatacatatagtatcgtatcattatctgtttttatagttttagaatgaataatttatctataacttcttccgtcgatgtcacattctaattcgactttgagaaacgtcgaccatctatgactagacaacgatgatggaccaccttcgtcgtttaagcacatttgtgctatatacggaattttaacaattctctttgagccgatagtatcagtgaaaagaatgtaaactttgtcataagtaccgtctttatcgacgaatgctcctcgtaaaccatcttttggaattacgttatccgccgtgaataaatcataaccacatggtccgtcaaatcttctccatcgtttaattccttcttttgatatgtttatgtcagatagtacacatccgttgtgactgattatcgttactttgctattttgataaggagcgtatcctctacctctatgttttgggtcgtctgaaccgtctattttccaacatttgggatttccgttattggttccgcatactaatgtatccttatccgcatcctctacttttatagatgttgttatataattattattagttaaaccagttttgtttagtttattatttgaaaatgtgtataccgccccattaacacccgtgtataatacgtcgtctaataagtaagtagaaattatttcttcactcgtttcaaacttatgccattcaataccgttagcaaaatagaataaaataaataacaaaggtatcattttaaataaataaaaaatgtcaagagttagaatatcgttgatatacctctatacgttggttgttataacaactacaaagaccatagagtatacagcatgtaatgataccatcattattccgtgtactatagataatccgacaaagtatattagatggaaattggataaccatgatattttaacttataataaaacttccaagacgacaatattaagtaaatggcatactagtgctagacttcattcgttatcggatagtgatgtctcattgattatagaatataaagatatcttaccaggtacgtatacatgcggggataatactggaataaaatctactgtgaaattagttcaacttcatactaattggtttaatgattaccaaacaatgttgatgtttatctttacgggcattactttattcttattatttctcgagatcacttatacatcgatatccgttgtattttctactaatttaggaatcttacaagtatttggttgtgttattgccatgatagagttatgcggagcatttttgttttatccgtcaatgtttactctcaggcatattatcggattgttgatgatgacattaccgtctatatttcttataattactaaagtgttttcattttggttactgtgtaaattatcatgtgctgtacacctcattatctactatcaattggccggatacattttaacggttttgggtttgggattgagtttaaaggaatgtgttgatggaactctgttattatctgggttgggaactattatggtgtctgaacattttagcctgttatttctagtctgctttccatcaacgcaaagagactattactaggcatgtgtataataccacgagctagtagacgtggaagaggaaccaggaactattgttattttataataatcgtgttccatataatccttgatcttattcttattctttttatcagattttttgcttccagttttatcagtagatatacaacagagtttcataaaaagagaagagaatgaatccattccgtacagtatttgataatagcttttttttcgttttatgaggtatttagagattagagatgattaatgatccccatactagaaatctattaatacacagaaatactaatgctcatatttatattatcaattctaccgtacaatatttgttccttgataggtacagaattgtacgactgcatttttttgtatactaagtcgaatggatgctcgaggttacaaacatgtattaaagtatcttgctcgatgctagaatttatgtacttggcagaggacatacctatacagtttgatggaataggaaactgcttattgtcgatggttataatggaataccacttattattcgcaaatatctgatcgcatatgtgtctatccaaatagtcggtaactcgtctaataatgaatacagacaacggcaaataattaatcagtgacagattgtttacatatagtatgtcgtttgtaaacgatgttaccaatcgtttgctgggtatatccgctttagcaaccagtatggttgtagggcccttgctaactacgacacatttactcagtggggatatgattacagcatgatcaatgggaaatgttagaatatttttgtcattgatgtcattatctatagagataacacatcctccgacagaactaatacagagtataatagtcgatagtctatggggaataagatggtacatctcattgtcatttacaacttctacgcttaagatgttggtaagaagtaccgtttcatccatctgtctattgatctcatcagatataattttttgatgttctgtatctatataatatctacagtcattattagcaataaaattgctaattttagaaatgccgaatacagggaatatctccatttgtacaacgtgacggcagcaataatactaaatattacttcaattttataaaaaggaaactaatcacaccaatgatacgaccgatgattctatatcatcgtgttcatgatcttgttcttgcttattaagataatcatcgctatgtgctcgtctaaacggattattctcactaaatttattgttaagttctgtaataaacggatttgacttgctacaaatactggttttattataatttacgaaaggattggatgaatagttaggattctgtttggtatcttcattaagtacttcaacagtctccgtttcattaattactactgtagtgttctgataaatagtctgttcattacgatcattatttattagcagcgtgcttccagcaacactatcgtaaatgtgttctgtgctaggcgccataacattggattcgttatcccatattaaactaccagcgaagctatcatcgtccaatatctcattcctagaaatattatctacgtcattgttttgttccatagcactacagtgatcctcccagtctgattcgctatcagttgatttactagatttgctggaattagaactctttatcttttttaattttgtcatgataattttattgtcattatagacagtacgtatctttttcctacaaatatataatatataacatactaatattgttcccgcaactacggtcaccgtgataagaggtaccagcatcatttctgattgctcaatatacgtactactagttcaatatttattgttttattatttactttacaacttttatgataaaaaattactattgcatttcccatcaattataatccatccattgccgtctgatatgcagaatgaagaattaaacgacaatttcattttcagattatctgaaggattgatgattagatgataatctccagctgtatacaggttatacgcttctatgattgtagcgttaaaaacatcaatagatgggaatagataaaatggctgatgtttatcttctatatctaacatgatatcatagtcgcatgctatgatgatggtattttttgatctgtatgcggcacaaatgctataaatgttgaatctagccaaatcattagaatcctgaggaactattttacccttatagctaaagtagcatttttgcatgtcggaatattttatatcccgtacatctatttggacagtttttatgttacctataatgtatggtcctataaagtccatgattgagatatcgagatcatcatacaatgtatctgttatagtcaacacacccattggagtaataacaaacgcggcgtccatggcggcgtacgttaacgacttattattaattcattttttgttgtcacttgtagaattttttaacacatagtacagattgagtacttttacatactgttttaaccagttttccagacttgtatatataacacgcttcagcatccgtcgtactgtttagttgtttaaaatttgttaatttactaatatctatatctttatcattattaatatctaaccatttattattggtcttttttaaacttacccaataatctttataaaaaatactaaacaatactctcagatgtctagtatccggtctaggcaatctggctcgtaatttacgacactgataaaccgcattatctgtagacattttaatgttagtatctaaataacaatgtttatcgtattgtatccatccattggcgcaagcactaggcatcagttcttctttgtaatgcagaaatgttcctatgccactaataatggttgagagtatcatcattatagcggccggcaccgacaacttcttaaacctacttacagtttgtctattaagcgatttcatttattaatgtacaaaaataaatattagttcattgttttaacacaaaaatactttctaacttcttgtgatacatcagaatcttgataatcggatgtagtttttgtaattggattaccatcagatccccatgtatcctcaacataatcaatgagccaggtaatcaagacatcggatttattgggtagtgttgatgattccgcagtgcaatttgctttagcatccgagaataactggtagtctgaatgtaatatataacaagaaccctggtaatataaaccattacagctttctttgtgatcatattgtgtagtgctagacgcaacctttctatgagtagatgatgcagcagcaacggcaacagcggcgtcagtaatagcagcctcgttagcagacatgcattgatttaggcgcactatgagaaacgcggacatggtaatcatagatagtagtgaaataaccatagatattctaatacatagaccaatcacgcgtttgcgtttattctttccctgaattttgtctccgtaaacagtagcggagaacacagatgtctgctcttcgtcgttttctggtgtcatcatgataataaatgttatttatgtcacgatgtgccttctttgttctcctccctactaacgaccttagttttccatattttgatttattatcaaattaatttagtaactgtaaatataattatgaattgtttccaagaaaaacaattttcaagagaaaatttattaaaaatgccgtttagaatggttttaacgggaggatctggatctggaaaaactatctatttactatctctgttttctacactagttaaaaaatataaacatatattcttgtttacacccgtttataacccagattatgatggatacatttggccaaatcatattaatttcgttagtagtcaggaagctctagaatataatctgatacgaactaaaagtaacatagaaaaatgtattgctgtcgcacaaaatcataaaaaatcagcacactttttacttatttttgatgatgtaggcgataaactatcaaaatgcaatactctaatagaattcttaaactttggaaggcatttaaacacgtctattattctactatgccaaacttatagacacgtaccaatattaggacgggctaacattacgcatttttgtagttttaacatttccatctcagacgcggaaaatatgctacgatcgatgcctgtaaaggggaaacgaaaggatatattaaacatgttgaatatgatacagacagctagatccaataatcgattggctattattatcgaagactccgtattttgtgaaggtgaattacgtatatgtaccgataccgccgataaggacgttatagaacaaaagttaaacatagatattttagtaaatcaatattctcatatgaaaaagaacctaaacactatattagaaagtacaaaaacaaaattgtgcaatagcgatcaatcatcgtcgtcaaaaaatgtatcatcataattattaacttttgtaacaatagtcctatttagagaaagtctatcgatagacgatcccaatttgtaaattgctccactacttgtcactccatgatatgataaatccatgtaaaatagcatcatctttagatcattaattgttaccttccccaatacaaccaaatcatcatgatatatacctcctccagacaagtatttaacaacggtagaatgctttggcttataaaatacaaatgacattcccttatgtttaatcttaatcttttctttagttattgaatcgttacaattataaaatgatgttttttccaaaaacctaagtgtatttaaaatagatgccatgttaaaaatgtccgccgtcgactttttggaacgattgataaaagctggtgtttatatttatgttttacggacaaagtgtgtaattgcagctttactagtaaaaaactattccataaaagacgaataagatacaaacacaaatgtttatataatatttaaatggaagaccttaacgaggcaaacttctcacatttattgataaatttatctaataataaagatatcgatgcgcaatacgcgtctacattatccgtggtacatgaattgctatccgctataaattttaaaatatttaatataaacaaaaagtcgaaaaagaattccaaatcaatcgaacaacatcccgtcgttcatcatgcagcatccgcgggaagagaattcaatcgtcgttgaactcgaaccctcattggctacatttatcaaacaaggatttaataatctcgtaaaatggcccttgttaaacattggaatagttttgtctaatacatctaccgctgtcaatgaggaatggctaactgcggtagagcatattcccaccatgaagatattttacaaacatatacataagatacttactagagaaatggggtttttagtctatttgaaaagatcccaatctgaacgcgataattatataactttatacgattttgattattatattatagataaggatacaaattctgtaactatggtagataaaccgaccgagttaaaggaaactttgttacatgtatttcaagaatatcgtttaaagagttctcaaacaatagagcttatagcgtttagttcaggtacggtaataaacgaagacatagtttcaaaattaacatttttagatgtggaggtatttaatagagaatataataatgttaaaactatcatagatccggattttgtatttagatctccatttatagttatttctcctatgggtaaactaactttcttcgtagaagtatattcgtggtttgattttaaatcgtgtttcaaagatattatagatttcttagaaggtgctctaatagccaatattcataatcacatgattaaggtaggtaattgtgacgaaacagtatcgtcttataatccagagtctggaatgttgtttgttaatgacttaatgactatgaacatagtcaactttttcggatgtaattctaggttagaatcataccatcggttcgatatgacaaaagtagatgttgaactatttattaaagcattgtctgatgcgtgtaaaaaaattttgtcagcttctaatagattataaatgaactctctatcaattttttttattgtggtagcgacggctgcggtgtgtttactttttatccagggttactcaatatatgaaaattatggcaatattaaggaatttaatgctactcatgcagcattcgaatattcaaaatctataggtggaacaccggcattagataggagagttcaagatgtcaacgacacaatttctgatgtaaagcaaaagtggagatgtgtggtttatccaggaaacggttttgtatccgcttccatatttggatttcaggcagaagttggacccaataatactagatccattagaaaatttaacacgatgcaacaatgtatagactttacattttctgatgttattaacatcgatatttataatccatgtgttgtaccaaatataaataacgcagagtgtcagtttctaaaatctgtactttaaatggacggaactcttttccccggagatgacgatcttgcaattccagcaactgaatttttttctacaaaggctgctaaaaagccagaggctaaacgcgaagcaattgttaaagccgatgaagacgacaatgaggaaactctcaaacaacggctaactaatttggaaaaaaagattactaatgtaacaacaaagtttgaacaaatagaaaagtgttgtaaacgcaacgatgaagttctatttaggttggaaaatcacgctgaaactctaagagcggctatgatatctctggctaaaaagattgatgttcagactggacggcgtccatatgagtaacttaactcttttgttaattaaaagtatattcaaaaaatgagttatataaatggcgaacattataaatttatggaacggaattgtaccaacggttcaagatgttaatgttgcgagcattactgcgtttaaatctatgatagatgaaacatgggataaaaaaatcgaagcaaatacatgcatcagtagaaaacatagaaacattattcacgaagttattagggactttatgaaagcctatcctaaaatggatgagaataaaaaatctccattaggagccccaatgcaatggctaacacaatattatattttaaagaatgaatatcataagaccatgctagcgtatgataatggatcattgaatacaaaatttaaaacgttaaacatttatatgattactaacgttggtcaatatattttatatatagtattttgtataatatctggtaagaatcacgatggtactccttatatatacgattctgagataacgagcaatgataaaaatcttattaatgagcgtatcaagtatgcatgtaagcaaatattacacgatcaattaactatagctctgagaattagaaataaattcatgtttataggatcacccatgtatttatggtttaacgtaaacggatcacaggtatatcacgacatatatgatcgtaatgccggttttcataataaagagataggtagactactatacgcatttatgtactatctatctataagtggtagatttttgaatgatttcgcactattaaagtttacgtatttaggagaatcctggacatttagtttgagtgttcctgaatatatattatatggtttaggatattctgttttcgatactattgaaaaatttagcaatgatgctatactcgtttatattagaacaaacaatagaaatggatatgattatgtagagtttaataaaaaaggaattgctaaggtgacagaagctaaacccgataacgataagcgaattcatgctataagactcatcaacgatagtagtgatgttcaacacatacattttgggtttagaaatatggtaataataaacaatgaatgcgctaatattcagtcgagtgctgaaaatgcaactgatacaggacatcatcaagatagcaaaataaatatcgaagtcgaagatgatgtcatagacgatgatgattataatccaaaacccactccgataccggagcctcaccctagaccaccgtttcccagacatgaatatcataagaggccgaaacttcttcctgtagaagaacctgatcctgtcaaaaaagacgcggatcgtataagacttgataatcatatattaaacacattggatcataatcttaatttcatcggacactattgttgtgatacagcggcagttgataggttagaacatcacatcgaaacattgggacaatatgcagtaatactggcaagaaagataaatatgcaaacattactgttcccatggccattacctactgtccatccacatgcgatagatggtagtattccaccacatgggagatctacgattttataattacccgattgtagttaagttttgaataaaattttttataataaatggaggtcacgaaccttattgaaaaatgtaccaagcactccaaagatttcgccactgaggtagaaaaactatggaacgatgagttgagttctgaatcaggtctctcaagaaaaacaagaaatgtaattcgtaatattcttcgtgatatcactaagtcattaactacagataagaaatcaaagtgtttccgtatactagaacgttcgacgattaacggagagcagattaaagatgtatataaaactatttttaataatggtgttgatgtggagtctagaatcaacactacaggaaagtatgttctatttacagttatgacttatgttgctgctgaactacgactcattaagtcagacgagatattcgctcttctatcaagattttttaacatgatatgtgatattcatagaaaatacggatgtggtaatatgtttgttggtattcccgctgctctaattattctgttggaaattgatcacatcaataaactgtttagcgtgtttagtacaagatatgatgctaaggcatatctatatactgaatatttcctcttccttaacattaatcattatctacttagtggttcagatttatttatcaacgtagcatatggtgctgtatctttttcgtcacccattagtgttccagattatatcatggaagcactgacatttaaggcatgtgatcatattatgaaatctggagatctaaaatatacatatgcgtttactaaaaaggttaaggatctgtttaatactaaatctgattctgtttatcaatacgttagacttcatgaaatgtcatatgatggtgtttcagaagatacggatgatgacgatgaggtattcgctatccttaacttgagtattgattccagcgttgatagatacagaaacagagttcttctactaactcccgaagtcgcgtctcttagaaaagaatattctgaagtagaacccgattataaatacttgatggatgaggaagtgcccgcgtacgacaagcatttgcctaagcctattactaacacggctattgaagaaccacacgctactggaggagatgaggaccaaccaattaaggttgtccatccccctaataatgataaagatgatgctatcaagccatacaatccattagaagatcctaattatgttcccacaattacaagaacggctataggaatcgctgattaccaactagttattaataaactaattgaatggttagataaatgcgaggaagaatgcggaaatagtggagagtttaaaacagagttggaagaagccaagagaaaactcaccgaattgaatgcagaacttagtgataaactcagtaagattaggactttggaaagggattctgtttataaaaccgaaagaatcgaccgacttacaaaagagatcaaagaacacagggatattcaaaatgggacagatgatggttcagatttattagaaattgataagaagactatccgagaattgagagaatcgcttgatagggaacgagaaatgcgttcagaactagaaaaggaactggatactattaggaatggaaaagtagatggatcttgtcaacgagaacttgaactcagtcgtatgtggctaaaacaacgcgatgacgatctccgagctgaaatcgataaacgtcgtaatgtcgaatgggaactgtccagacttcgtagggatatcaaggaatgcgacaaatacaaggaggatcttgataaggccaagacaaatattagtaactacgtaagcaaaatcagtactctagaatcagaaattgctaaatatcaacaagatagggacacgctttctgtagtacgcagagaacttgaggaagaacgacgacgcgttagagatctcgatgaatgtacacgcaaccaggaagacacgcaagaagttgatgcactgcgttcgcgtattagagaactagagaataagttgaccgactgcatcgagagcggaggaggaaatcttacagagattagcagactccaatctaaaatctcagatcttgaaagacaactgagtgaatgccgtgaaaatgctacagagattagcagactccaatctagaatatcagatcttgaaagacagttgaacgactgtagacgtaataatgaaaccaatgccgaaacagagagagatgcgacgtcttagagatagaatctcagatattgaaagacagttgagtgactgcagacgtaataatgaaagcaatgctgatatggaaagagagatgcaacgtcttagagatagaatcatggatcttgatagacagcttaacgagtgtaaacgcaacggtaacggagcatcttccgaggaggtaaataggctaaagactagaatcagggatcttgaacgatctctagagatctgctcaaaggatgaatcagaactctattcggcatataaaactaaactcggacgtgctagggaacaaattagtaacttgcaagaaagtctacgtagagagcgtgaatctgacaaaacagatagttactacaggagggaattgactcgcgaaagaaataaaatcgtagaattggaaaaagaacttaataagtgtttcgatgccaagtacatcgacgaaatcaattccaagaaaacccgtatttctgatctcgaacgacaactagcagcctgtaaatctaatggtggtagcaatggaaacatggaccaatacaaacgggaaattgaatctcttaaacgcgagctcgccgagtgtagacgtggtaacaatggatcccatagtgattgtaagtactatgacgaagaagcaagagattgtgttaagagctgactcaattgcatgaagatcttaaacgtgccagggaatcagataactacaaaagagagcttgagagacaacgtgctaaagttattgatgtcgaaaaggagctggaacgatatttcgacgacagtagactcgaggaatgtaaaaggcatggggatgaaatgttgccgatctagaaaagaaacttagagatggcggtaatggaaacggttgtacatccagctgtgaattcgaaagaaaaagaatcacagtcctaaaagctgaacttcggaaatctatggaaacaatcaaagcgttggagaaatttatggagttcgatcgccttcagaaagactgctctgataaactcgatagagagagggagagacgcatgaaggctgaacgtgaaatcgctcgtaaaaactgcggaggtaacccatgcgaacgtgaattgaaatctgaacgtagtaacgtgaagaggttggaatatcaactagatgctgagaaagaaaaagttaagttctacaaaagagaactagaacgtgatcggtatctttctagtagatatcttacctcttcttcagatccacatgagaaaccattaccaaattatacatttcctcgcattaaaaatgtatctccgttgacaactgaggctacaggttctgtagaagtagcacctccatccacagacgttaccgaaccgattagtgatgtgacaccatcggtggatgtcgaaccagaacatcccccagctttctgaatatcagacttcagtatcccaagtagcagttacacctccaccaaaacctgaaactccacagattttcgaatatcagacgtccgattctatagttaacaatccacgcccattttataattcggatctcgaatttgatgatattgatatgtatctactaccaaactagaatattacaccagaaaagacggcttgagatcaactttatctaatggtttataaaacgaaggaggccttcgttcgaaatctaatttaacttttacgcctctggcgttcatttgagtaagaaatactttagatacgtgcgtggtatcaatttttgttaagagaggagagagattaagttttgaacatctaagacatgtattaatacccttgatttgtgctgctatgtctccacaattttcacaaacatacacatcttgataatcttcttccgaatctttcaaaacttctgtaatagtattggctgcgccatgcgctattaaacagtctctctccatttctccaaacttaatacctcctccacgttttcgtccctcattcgcttgtctaatgagcttcgtctttttacctctacatctaacggttgccttgtcctgagttaaatgtctcagacgcaagtaataaattggtccaaaaaatactttggatgcataaggcttatccgtttcaggatcatagagaatcttttcacaaaagattttatccgataattcttcatcagacaatttcggatttgaatgctcataacattgtttagcgaattgcatatatgtatcgatggatgtttcgttactactaggaaaacagacaggtcggttttctcccttattgttgtacggcttagcagaatatgcggctgttaaaataacttctatcaacatagatatagtttttctagagaagatggatgtagaattaataatgacatctggtgtgataccattttcgtcgtatggaagttccgtttcatccgcgacatacgcgactgttcccttttgactcgttctagtggtaaatttgtctcctagaatgggtcttctttctttcatggttaatactcgtaccttaactttgtcagtaagttctacttgtactcgttcaacgcgagatttgtacatatcggtatatttttcggaaacatcaaagctaatctgattatctctagcaaaatcatcttcaagagttcttgatgagatatttcgtgccatagcgtctccggattccaagaaagcattcagtctaactaatccattactttctaattttgaataggcgttagacctatctctttctttgttattaaagttttccaatggaatttctacttgatgtttcttggctgtaacaatatcgagaccgcctctctgaataaattgttttttgatgataattccatcctcttgattgatacctttgtacgacattaatgctatagtaacatgttggccgaagcaattagccgcaatctttgaagtttctaaagccttactaatgacaattggcctctctggatacatcaaatgaattccattgtctattttatttcgtatatccgaactcagacaagagatagcttgtttagcttgagcacatccaagaatagctctgggtccagaattgtgattgattcccactagtgaagatgctacatatccatctctaaattcggcaggaaagtcacataaatcgtattgctttctttcatcctttgacatcattctaaatttttgaaccgattcacatacgttactaaaagtaaattgttctatatctaccatttcgatgacatgtggaaactctttctgaatgtcagagaatgtcatatcgtctaatctgctttctaactccggacacacatccatcatgagctctccgttatccacaaccaagaatggtctgactaatcttcccgctccaatattaatgcgaatttcattcatgtgatccctaactaaagtaatacctacctccaagttaccgaagaatcccatccgttttctacgtctaaagtcagttacaaaatcacatatcatatttggattaagagatgcgactagagcattttctatagtgattggaaatcctgtttcaaagtaacttatatcatctttataatatgatctgatatactcacaaattttcttttccaaatccaaatactcagacgttagtatatttgtaatggaactcaagacagacaattgagatactaaacctacctgaggacctctttccggaacgtctgatgaacaaaagtaaagatattgacttggatggtattttctgacagaaaacatctttgaaatctttacttgatccggataaaatccaacactcctaggaatagaaatattctgcatccatgaatagtgaggatgtgttcgataactaccgtctgactttttgaactttccactcaatagactagaaaatgcatgattaagtccaggagttgttagtacatgaatgtttaccgcgtaagtgcctctgttcttgtgattgttcatgatatcgtttcggatgttgcctatgtaattctctaattcatcatgtgccaacgtctcaaaatatttgccgtacgttaggatgcgatgacaaaccatcgaatctctatctggatatctagaagtgtggtagatacagtagagaaactttcttagtaaagatatcatataaaatccctttagttgatcgggtgtatagttcatatgaggtaaaaagttatgcagcatttcatatttgaactcgttaatcgttaactgagatttttgtttaatgtgttcagcttccaccaggtcattaatgtatgtatcaatattaaagtcagtaatagattcagtaattcgtttagcactatctattatcgcgtttactagatagacaacttctggaggcatatcgtatgataaactacgtctaatgaattctagactcactctagataaatattgagacagcaaaacaatattgaccgttataaatgtctttgtcgatgatatattcaacgcttccaattgtgatatatccagagatatcttgtaatggcgatatcttgtcggtaatacattaggaggggatacggaggaaaacgagaaagtgaatgagtttggcttaacaaccctaaattttggccatgttgtaatcttttctactagattaattcctactttttcgacagattgtttattgataaagactccacctatgacattaggaacaagatacttggctgtatcaagtggatttttattcccgtatcctattagtagcggaatttttatcaaatgagaatcttttccctcataactacttattttagtgatggatataccctctttggtcattacctctttaaagatatttacagtgaacgtggctaatgcgtcataactcttacctttaatactcgcgattataggtgagtaatctggaggagtcactttaacattgctaatttctatcataattcgttctgtattattcttaaacgataagagtggccgcttgacggtcaagatttcatgcaatcgatgcaatataaaattagaatacgatacatattggaaatgtaacggtctataaaaaactccggctttaggatcaggcaccaaaaacttataccctagtcgttgatccatttctgaatcagtgttttttttcattttagaagcaattcttttagacgatctaccgattccgtttctatatctatgctatttaaaatagtcgatctttccttcatcatttctatcatattctcggatttagtcacgtaatttatacaatcctccagagatcgtaatgctacaatattgagctttttccccttaaaaaactttattttgctatcctcatctaacagagaggggaaaacggtatgatccaacgacttaataaatgtcaggttaaacatccctattttgaaattgctaactccataaacatcgtgttcagccattttcttaattaggaataatttctcatctaatgccgtagccgtgagtacgtggtttacaacattagctacttctttaaagtactcgttttggatgatatcttcgaacaacagaaataaattataatagacatagaataatttgtcaatcatgtgtatacaccccttttcatccttgtccttggatagaataatgtgcatagtagaatccttgaatattttcacacatgttctattagtaaaaataatttctatagtttgtaatatagagctttttccacgcgttactatagagtgattaatgatatctactctcattctcttagaaatggttttgatccaaggttgattaatgttggacctgactgtagtgctcagatactcatcagactttttaccggaaaagtaatttgcattagtgcctccatgtacagttttctttatttccccataattgacctttctcttcttattggtagttttaatatatgatacaagagatgacttttccctctcaaatatctctactgtacgagagctaatattgctattatctgagtttatatcgaaataatgacaacatttcacttgtgaagaatcgttaaataccggatacgtattctgattaataatgtgtttagtaagttggatgtcgcaatacactagtttcttaatggcatgatgtatatctttattatacactatattatcaaacatatcctctgaggaaatgcgttctttcataagaccatatatatctcctatttcatcgcaacttattagatgaaagttaaaaatagttctggcatatctatcttctatttcatgtagaaaggtaaatagattatccataatggcgttactaacgttattacattttttttatgtaatttctagatttacacctattataaggtgtataattagtattccatttatctaatacgtatctcatagccaaattgaaactatccgctacatcgtctaatttgcgtctatccggaacggagtctcgcaatccgaatgtgtccatccaatcaagaaatgcttcgaccgatctcttttttcgatctctatatgaattaccagacatgacaggcgagacgcaaataactttggcagccgatgtatgatataaaaagcctttaataaaatagataaatttaacatacggcgaccttctaggctgacgttctagaagaactgtagtgtattcatattgtgacaaatctttagctatgcgcctttcccaatcagaactccagtctaattttgatatatccaataccctaacggagttatccttgacttctaaaacagttctggcaggattttttgcacctatatcaaaggcgcatattatttcactcgaataatctttttttgacatcggtgacgacattaaagattgagacgaactggttaaagtttccatatatagtttcaatactcgggttatttaaacaattagtattttcaatattgaaatttacaaccttacaattttctattttgaaccgcatgttattaactaacgttataaaatccgcttctggatatcccaaacattctctgcttaaatcaaatgctgattggttttttatttttcgttttacagttccggatttattaatctcatcaactaactcatcgacagttgcgcactcattaatatctaatttattagtcaattgctttaagcctgcactaccaaccttagagaaatactttccgttaacataatagtctcgtcctatagtgtctataattcgttttattacttctcctctagtttctgttccgtttccatcatagtcgtataaaatggaaaatgtgtttttcttttttacttttacaaatgtatgttctctaaccttggatcgtattaaatggtctacatcttttactaatatcttttttcctgattttgttataacgctaggaataaaaatattatctcctatacgatctaccttgatggactcaatatacatgaatgagaatttgaaaaagtctacaacttgccgcctaagttctcccaacttaatatacgatatggatatttttggaaatttatcatcaaaagagcgttctataatagagtataactcgtcgtcaaataatgtgtcttcctctatttcaatttctaaatatttgggtatgtttaatccgtactcactagctagtttaaatatattaactggagactgatattttgatatagcatcttccattatccatctattgtttaacaaaacaaatctcagaaagtctattccgttatcactatctaatactttgttacacgcacttcgcatattatctggtatttgaaaagagtttccagatccaagttctaccatatttttacccttcgaataaataaagacgcttccaaaatataccggtaagaaaatgtaatatcccggatcaatattaaacggtttattttttacctcatcataataatcagatattgacgtctcgacattagctaccttttgcacgcctattttccagtaagtagatgttccccattctaccaaagaattatacttttctatagccgcagaatctgaaaatctcaaacttttgtacagactaagtaattcttttaagttagttaaatcagcgctagaagtcatgataactttatttttaatcctatgttatttcattcttatttttaatattatagtacctgcaatatctgaaaaaatgagacgcgaacgagccgcatacgtaaactacaaacgtctaaacaagaatttcatttgtgtcgatgatagactgtttagttataattttacaacatctggaattaaggcaaagatggccgttgataacaaaaatgtttccattccatgttccaagataaacgaggtcaataataataaaaatgtcgatacactatattgtgataaagatagagacgatataccaggttttgcacgatcgtgctatagggcatattctgacttattttttactacctaaatggatagcaccaatgtgcgttccggaatgaagagccgcaaaaagaagcccaagactacagttatcgatgacgatgatgattgcatgacgtgttctgcctgtcagtctaaattggttaagatttccgacatcacaaaagtatcattggattatattaatactatgaggggtaatacactggcctgcgcagcatgcggatcgtcgcttaaacttcttaacgattttgcgagttaaatattctatttaatacacgttcttctctggatgatgttgtacatgcagaagtgggatcggattcttgatgtttccgataacttttttgtttaaatcctagtttatctacagacagactaataattcgttgcatgaaatttcctatcatgtactttatttctttgatggatgtgttaggaaatacatataccgtcctatctaatagttctgtttctcgacataccctccctagtaattgctctatttgcatattgttgattactgccgagcaaatgaacaacgaatccaaactaggaatatctaaaccagtaccggaataaaataaggtggatacgaatataaatctatttagttccttgattgatttgaccatatctggagtacgtctattttgggcgtctcctataaatacaacctctggtccgaaaagatctaataatcgtttgtagaataataccatatgttcacgtagtttagtaataactaaaatgcgattaatagttcctgacttgaattcttctaccagggtattaagaataagttgatttctaggctcgtctacagataataacttctcggtatatatatgatatttattagatggtccatctaatcgttttatcatatgtctaatattatctgtggaatatggctcaaaaaaactatctactgcatagatagttttttttagatcggataacttggcaatattaataatactgttacaataaattctgttagatggtctaggtgtagcagttaaaaaataacacatcatcggaggataatacgctaaaaatcttgtaactgctgtattgttcatcagattatacgtatgtgattcatccaagatgaacaaatcataatgcttattgatatatttacaaaaggcatcgtttgtcagatgtctactgactactattaatacatccggactttgagtctttagttcctttaatagactacttactccatctatggatatcttatgttccaatccgactgcctctacctgtgtcttccattgatgtattaacattttattgggtacgcaaatgacggtttttctaccgtgtgtagccataagataacacgtggtaatagtcttaccaaatccacacgccaagtgaagagtaatgtatagaggacgttttgattcgatcattttcctcatattagaaactacttcagatacgactttgcgttgaagaggatataactttggcgcatttgttggattgatactagtgattttattatcggtcgttgttaatgtttcaaatactagactcgtctttacggaaggagaggcgtaaaatcccttaggtatcagaaacttaaaggatgatcccggttcaacttctacgaaatccccgtcttcgttaaaaagacttaggggttgaccacaagtcattttttttagttcggcataaagattatactccatctttaatagtgacattttttaatatataaatgagttatttaagatattacaatatgcttgacgacttctctgcgggtgctggagtgcttgataaagatttatttacagaggaacagcagcaatcgtttatgcctaaagatggaggtatgatgcaaaacgattatggaggaatgaatgattatttgggaatcttcaaaaataatgatgttagaacgttactcggtttgattttgttcgtcttggctctatatagccctcctctaatctctatattgatgatatttatctcatcttttctattgcctcttactagcttagttattacctattgcttagtaactcaaatgtatcgtggaggtaatggcaacactgtgggaatgtctattgtgtgtattgtagctgctgtaattattatggcaatcaatgtatttacgaattcacagatatttaatattatttcttacattattttgtttattctgttctttgcatatgtgatgaacatcgaaagacaggactatagaagaagtataaatgtaaccattcctgaacagtatacctgcaacaaaccttatactgcgggaaataaggtaaatgttgatataccaacatttaacagtttaaatactgacgattattaaaaatgggggcagccgttactcttaatagaattaaaatagcaccaggaatagcagatatacgagacaaatatatggaattaggttttaattatcctgaatataatagagctgttaagtttgcagaagaaagttatacgtactattatgaaacatctccgggagaaattaaacccaagttttgtttgatagatggtatgtcgatagatcattgtagtagttttatagttcctgaatttgctaaacaatatgtattaattcatggagaaccatgtagttctttcaaatttcgtcctggatcattaatctattatcagaacgaggtaactcctgaatatattaaggatttaaaacacgctactgattatatagcatccgggcaacgatgtcattttataaaaaaggattatctcctgggcgatagtgatagcgtagcaaaatgttgttctaagacaaataccaaacactgtccaaaaatatttaataataattacaagacagaacattgtgacgatttcatgactggattttgtagaaacgatcctggaaaccccaattgtttagaatggttacgtgcaaaacggaaaccggctatgtctacttattccgatatttgctccaaacatatggatgcgagatattgttctgagtttattagaattattcgtcctgattattttacttttggggatacggcattatacgtcttttgtaacgatcataaaggaaatagaaattgttggtgcgcgaattatccaaaatctaattccggagataaatatttaggacctagggtatgttggttacatgagtgcaccgacgaatctagagatagaaaatggttatattataatcaagatgttcaaagaactagatgtaaatacgttgggtgcacgattaacgttaactctttagcgttaaaaaattcccaagcggaacttacgtctaattgtactagaactacgtctgcagttggtaacgtacatcatccaggagaacctgtagtaaaagataaaataaaactgcctacctggttgggcgcggccataacactggttgtaatatctgttattttctattttatatccatttattcgcgtcctaaaattaaaacaaatgatataaatgttcgtagacgataattcgttgataatttattctacatggcccagtacattgtccgattcatcaggtagagtcatcgttatgccagataatagatcattcacgtttaaggaagggtttaaattagatgaatcgataaaatctatattgttggtaaacccgtcgtctatagatctattaaagattagagtatataaacatcgcataaaatggatgggtgatatattcgtattatttgagcaagaaaatatcccaccaccttttcgtctagtaaatgataagtaattacgagccgttgctgctgttagttataacatgctgtgtactactatttaattttaccatatcttcgaaaacaaaaatagatattatttttgcagtacaaactattgtttttatatggtttatattccactttgttcattcggcgatttaaaatttttattagttaaatggacatgatgcttatgattggaaattatttttccggcgtgctaatcgctggaatcattcttttgattctttcgtgtatcttcgcctttattgactttagtaagtctaccagtcccactcgtacatggaaagtattgagtattatggcgtttatacttggtattattatcacagtcggaatgctaatttattctatgtggggaaagcactgcgcgccccacagagttagcggagtcattcacaccaatcatagcgatatttccgtgaactaagttattatcgtccatatatctcgacattgttgaatcattattactacttatttagtgaaaagatgatatattgcatacttgatcaatagtgaagttattgtcaataaatgattggtattcttttgttgatcggtatttgcgtagcagttaccgtcgccatcctatatgcgctgtataataagatcaagaactcacaaaatccgaatccaagtccgaatttaaattcgcctcctccagaaccaagaaataccaagtttgtaaataatctggaaaaggatcatattagttcattgtataatctagttaaatcttctgcataaataaaaatatttttagcttctaaatggcggataaaaaaaatttagccgttagaagcagttacgatgattatatcgaaacagttaataagattacaccacagcttaaaaatctactagcgcaaatcggtggagatgcagccgtcaaaggaggcaacaataatcttaattctcaaacagatgtgactgccggcgcatgtgatacaaaatcaaagagttcaaaatgtattacatgtaaaccaaaatcaaaatcctcgtcttcttctacatcaacatccaagggctccaaaaatacttctggtgctcctaaacgtagaacaacagcaactacatcattcaacgcaatggatggtcagattgtccaagctgttactaatgctggtaaaatagtttatggtaccgtcagagacggccaattagaagttcgtggaatggtcggagagatcaatcacgatcttctaggtatcgaatcagttaatgctgggaaaaagaaaccatctaaaaagatgcctactaataaaaagattaatatgtcgtccggtatgagacgacaggaacagattaatccagacgattgttgtctggatatgggaatgtattaaattaaataattttaattcgtttaacgaatatcttgagtataaacaatacaatattaagaaccggactgttaccgattcctagtttagatgctacagcatcgcagtcatctccgatctccacatcgataatttctgaagtgatatcggtactcagtcctttgatttcttcaaatccgagttttagcaatgcttgctcgataatatttatgacaataataatcacgttagtgacgataatttttcgttttctactttcgtgatattgtttaatcgttttatagattctatctatttcatcctccgaacaaacatccaagtcctcgactgataagggagacccgttcaaatttgcataattaacgatggctatacgcttattaacttctgttgatttgtacggagtcttaccaaatagtattttggtaaaattatctaaattatcagatgattttgtattagatcgttgatttctaagattaaccacttcatcctctaacatctgaattcttttatctttatcataaactactcccaaggatggtgtttgtgttggcatagaagttatcatagatctagattccattattgcttcagcatttttcgatactgtaatattaaatcttttttctcgttgttgacgttgttccgatatcaataactctctacgaaacgtaggaggtggagtatcgtcaataatagtagtatgaggttgtactcgttcgataatagtggccggtgaatcatcatctggaaatagatcttcattaagttgtgaggatatttcctctggagatgacactacggcggcattatgttctctatctaccacgttgttaacgtgagttagaatagacatttgacgaagagttatttcataatttttgttagatggataattatcttctgaaaactctgtaattaaatcgttttgtatatccgtcactggtacggtcgtcatttaatactaaataaatgatgcctattaagtcaatagttactcttgatcaattagaggactctgaatatttatttcgtatagtttctaccgttcttccgcatctatgtctagattacaaagtatgtgaccaacttaaaacaaccttcgttcatccgttcgatatattgcttaataactcattaggatccgtaactaaacaagatgagcttcaggctgctatatccaaattgggcattaattatttaattgataccacgtcacgtgaattaaaactgtttaatgttacacttaacgctggaaatatagatattattaataccccaattaacattagttcggaaactaaccctattattaatactcacagcttttacgatcttccacctttcactcaacaccttcttaatattagattgacggatacagaatacagagctagatttatcggtggttatattaaaccagatggctccgactcaatggatgttctagcagaaaagaaatacccagatcttaactttgataatacttatttgtttaacatcctctataaggatgttattaatgcaccaataaaagaattcaaggcaaaaattgttaacggtgtattaagcagacaagattttgataatcttataggtgttagacaatatataacagcacaagatcgaccccgctttgacgacgcttataacatcgcagatgctgctagacattatggagttaatcttaatacattgccattaccaaacgtcgatctcactactatgccaacatataaacatctcatcatgtttgaacagtacttcatttatacatatgacagagtggatatttattacaatggtaacaaaatgctcttcgatgatgagattatgaacttttgtatttctatgcgatatcaatctcttattcctagactggtagaattctttccagatataccagtaaacaataacatcgtacttcatactcgaaatcctcaaaatgctgcagtgaacgtaacagttacgcttccaaacgtgcaatttgtagacataggtagaaaccacaaattctttattaatttctttaacctgttggcgaaggaacaaagatctacggctatcaaagttaccaaatccatgttttgggacggtatggattacgaggaatacaagtctaaaaaccttcaggacatgatgtttataaattctacctgttatgtattcggtctttataatcacaataatactacttattgctctatcctttctgatattatctccgcagagaaaacacctattagagtttgtttgttacctagagtagtcggaggtaagactgttactaatcttatttcagaaactttgaagagtatttcatctatgactatacgagagtttcccaggaaagataaatctatcatgcatataggactttctgagacgggattcatgagattcttccaactactcaggctcatggctgataaacctcatgaaacggctattaaagaggttgttatggcttatgtgggtataaagttgggtgacaaaggtagtccgtactatattagaaaggagtcataccaagactttatctatctgctatttgcatcaatgggctttaaggtgactactagaagatccattatgggaagtaataatatctctatcatcagtattagaccaagagtaactaaacaatacatcgtcactacattgatgaaaactagttgtagtaaaaacgaggcagaaaaattaattacttcagcgtttgatcttctcaatttcatggtatcagttagtgactttagagattatcagagttacagacagtatagaaactattgtcctagatatttctatgcaggatctcccgaaggagaggaaaccattatctgtgactcggaaccgataagtatcttggatagaattgatactcgtggtatcttttctgcgtatactattaatgaaatgatggacactgatatcttttctccagagaataaggcatttaagaataatctgagtagatttatcgagagtggagatattacaggagaagatattttctgcgcaatgccatacaacatcttagataggattattacaaatgctggtacgtgtaccgtatccataggtgatatgttggataacattacaacccagtcagactgtaatatgactaacgaaatcacagatatgataaacgcctcattgaagaatacaatttctaaagataataatatgctagtcagccaagcattggactctgtagctaatcgttctaaacaaacgattggagacttgagacaatcatcgtgtaaaatggcattgttgtttaaaaatcttgttacatccatctacacaatagaacgtattttcaatgctaaagtaggcgatgatgttaaggcatcgatgttggagaagtataaagtattcacagatatttccatgtcattgtataaagacttgatagctatggagaatctcaaagcgatgctatacattattcgacgaagcggatgcagaatagacgatgcacaaattactactgacgatctagtcaagtcttactcattgatccgtcctaaaattctaagtatgataaactattataatgaaatgagtagaggatactttgaacacatgaaaaaaaatctaaatatgacagatggtgactctgtctcttttgatgatgaataaatgtcatgttatacagctatattaaaatctgtaggaggactggcgctatttcaagtagccaatggcgccatagatttatgtagacatttctttatgtatttttgtgaacaaaagctacgaccaaattcattttggttcgtcgttgttagagccattgcgagcatgataatgtatttagtattaggtatagcattgctgtatatttctgaacaagatgacaagaagaatactaataatgccaacactaataatgatagtaatagtaataatagtaacaatgataaacgaaatgagtcgtctataaattctaactccagtcctaagtaaaatattttaatagcgtatccttatcgcgtttgcttatcttgaatgaactggtcttttttaactcgttaatgaattttgtaaataattcatttctatctttaagtaattttattggaagttctgattccacagccaatgaacatgtaaattgtgaatcattttctatgaccagttgtaacttttcatacactgtaatcaatacagtatttaccatttgattaattacagcgcccgtactagcactccattgaacaagatcagattttagattaattagataaaatctatatgttatttcagataatgaacttaccagataactctcttgacggatattaaaaatgccagatgaatgttcatctcgaatagccagagctactgtagagtaatacggttcaaaatcataaacgtgatagtttccaaactggtatccgagtttttcttggatgatggatacttgagagttgaatttaaatttcttactatgttcattatatagttctggaaagaatgcttcaatcattgtttctgtaagtttgcatccttttgatgcgatagttaaaagtgctatataaggcgccacgataatgttattttttttggtaatagtgacgtcttttacagcgtcaacgcatctgaacaaataatgaatctctctatgatctaaaaaataaagtctttgtaaaaagaatcgtagtgctagttttctctcatcatccttagatctatgggcgaatagacgtctactacgggatataaaaccgctattttcctttatcataggtgttgtttgatctatatttacctcccctagttctacggaggcctccaaattaagatctggtactggttcgaacattgtaagacttacatcatcggtagtagattttcactttaccccacgatataaatatgcgatatatagtaagtccgcaattggtattacaggtgggtaaggggcaggaggtagaacgagccctatatctcactccatatgattacatagatgagaagtcgcccatatattattttttacgaagtcatttaaatatacaacagccggaaatagttaagagacatattctattgacgcttcgaatgactcaattaaagggatatttaggaaatttgttagatattaaggacgatattattatctattctcataagaataatttggaatatagttacgttgataatactatttttaatcccttcgtatatactcagaaaaaaacactactaaaaaacgatagctttttatacaatgtatatcctggagcgtgtgactttttggttatctgggtggctagagcgtgcgatacatctattccggaatttggatcgtacgaagatgtagataataatattatcaagtttgaaacaatgttgatggaagtatttccacaactagatttggacattactgtagaatcaaagtttaacaatatatttcgtaccaatctaaaactaactgggttaaaaaagatcattcagcgagttcaagacttggacattaattataagtcgttgttatctagatacgatgaacactttattaatatgaccggtaatcattttattctaaacgatgaacagttaaatctctccatttgggacttggatggtacattagcgttatctagcgacggcgataccgtgatgattaataacgtaaaactatttacagatcttgtgtccgatatagatacacaaatggaacgcatcaagggagatataacgtataaggtacatttggcgactcctatcaattctagaataaaattggatatcgagactagcttcatttttatagagacggcgactaataatattttactatcctcggataaaaaaatatctatcattttggccaaaaaccatatatctattaaagtgaaaaaccatattcctaacatagaaaaatattttacatttttagttattgccattaatgccatgtttaatagcgttcaaaagtctgctgattttaccaaagtggaaactgtttactggtctaggatatgccaaaatacaaagaataagaatagaaaacccatcattattaattatctagatcctggaatgaaaaaaatcagtaacaacttttacagatccgatgagaaagaagtctttattaatgataacggcataatgtttacgtgcatggatcctttggggaaatataataaggtgggatttcttaatatatttcatgatatgcggaaatattgtatcccttgttgttttctacatgatcaatctcatcgaagtacattttcatcgtgtgttcatcaaattgacgttgaaaaaaagatagtaagtccgtatatccttaattttggtaaagttgtaacagaatccaaaatgtcatttctccctattatctttgacgccttcttaaatgatggaatgactgctaatatggaacaagataataaacgactaaaggaaactagtggatatcatatagttagatgttgtgctggtgatgatatagttcgtttacgaactacatctgatattattcagtttgtaaacgaggataaaaatattcttatagttaacgacatggtatattttccaatgaacgcgtccgatataggaaagaaaatacatatactcattcaagaaatagttcatgaggtaatgatagtaaaaaagaaagagtctagtgataaaatcgattttttcccacccaactataagttattgaaggatctatttccaaaacaaactattcaaactcctattcaatctgacgcgggaatggtgttaacaaccgatggattctacatagatggaaaactttttaacgaagatctgtcgtctaaatacgttacatttacaaaaaatgttattgcgtctgatgccgtagctaaatatttttctcctttgtttaaatacgttatttcagaagctaaagatagatttatcaaaacgtggatgattaatattatgatacatatgaacgtagatcctaataatataataccgacgttagaaaaatactatcccaactctggaagagcacaaataaattaaacaactaaatctgtaaataaataatggacaaacttagagttctatacgatgagttcgtcaccattagtaaagataatcttgaacgcgagactggtcttagcgcatcagatgttgatatggattttgatttaaacatttttatgacgttggttccagtcttggagaaaaaggtatgcgctattacaccaactatagaagatgataaaatcgtaactatgatgaaatattgtagttatcagagtttttcattctggttccttaaatctggtgccgttgtgaaatcggtatataataaactagatgatgtggaaaaggaaaagtttgtagccacatttagagacatgttgctcaatgtacaaactctaatttctcttaactctatgtatactagattgcgtcaagataccgaagatattgtatccgattccaaaaaaataatggagatcgtttcccatttgagagcgtcgactacagagaacgcggcgtatcaagttctccaacaaaacaatagttttatcatatctacactaaataaaatcttatctgatgaaaactatctcttgaaaattattgcagtattcgactctaaactaatttctgaaaaggagacattgaatgaatacaaacaattgtacaccatttcttctgaaagtttggtatacggaatcagatgcgttagtaatctggatatatcatctgttcaactgagtaacaataaatacgttctctttgttaagaaaatgctacctaaaatcatactgtttcagaataacgacatcaatgcacaacaattcgctaatgttatttctaaaatttatacgttgatttatagacaattgacgtcgaatgtcgatgttggatgtctattgacagatacgatagaatctgccaaaactaaaatatctgtagaaaaaattaaacagacgggtattaataatgttcaaagtcttatcaaattcatatcggataacaagaaagaatataagacaataatctctgaagaatatctatcgaaggaagatagaatcattactattttgcaaaatatcgttaatgaacacgatataaagtacgacaataaattgctgaacatgcgagacttgattgtgacatttagagaacgatattcgtataaattctaatatcgtttttgaagtttccaaattttgataatatagtctagatggaattttagaccatctttgtcaaaatcgtttaccgacaacaattctccgttcttttcgatgactataggacaagaaccctcctctatctcttgtataattacatgtagcatattttgcttcatcgtttcgtcagaaaattctgaaactagaggtaatcttcctcgttgaagcaagttatagctttctgctattatacccgctatttcaaatagacttatacgtctagtatagcgtcgtttaagagcagatatatgattccctatatgtttaagattggaatgcgcatcttctatatgagtggatgctgattctacaatcttataagaagatttgggatctatatcactagtttctagtgactctccatcttcttcctcttcttcatcatcctcgtattcggtgagatcatcggattcatagtcgataatatcgtctgtgtctgccatttaatcttataatcgcaattcaattttaaagccttaaatggacttctttaacaagttctcacaggggctggcagaatcctctacaccaaagtcgtcaatctattattctgaagaaaaggatccggatacgaaaaaggatgaagcgattgaaataggactaaagtctcaagagtcgtattatcaaagacagttgcgagaacaactagctagagataatatgatggccgccagcagacagcctatccaaccgctacaaccaactattcatataactccacagccggttccggttccgacacctacatcggctcctattcttctacctagtagtactgctcctacaccaaaaccacgacaacaaactaatacatcatctgatatgtctaatctttttgattggctgtctgcagatactgatgcgccggcgagttcactccttccagcgttgacgccgagcaatgctgttcaggatattatctctaaatttaataaagatcaaaagacgacgacaccgccatctacccaaccttctcagacgttaccaacaactacatgtacacaacaatcggatggaaatatttcttgtactactccaacggttacacctcctcaacctcctattgtggccactgtatgtactcctacacctactggtggtacagtatgtacaacagcacaacaaaatccaggagcaacatctcaacaaaatctagacgatatggcccttaaggatctcatgtcgaatgttgaaagagatatgcaccaacttcaggccgaaacaaacgatctggtgacgaacgtatatgatgcaagggagtatacgcgtagggcaatagatcaaattctacaattagtcaaaggttttgaacgattccaaaagtaataagattggatattaaaatcacgctttcgagtaaaaactacgaatataaataatggaagccgtggtcaatagcgatgtttttttaacatctaacgcaggactaaaatctagttatactaatcaaactctttctttggtagatgaagatcatattcacacttctgataaatctttgtcttgtagtgtatgcaattcattatccaaaattgtagacgatgactttatatccgcaggggctagaaatcaacgtaccaaacctaaacgtgcaggaaatgatcaagctcaacagcctatcaaaaaggattgtatggtttctatagatgaagtagcatctacgcatgattggagtacgagattgagaaatgatgggaatgcaattgctaaatatctaactactaacaagtatgacacatctaactttactattcaggatatgcttaacattatgaataaactaaatattgtcagaacaaatagaaacgagctatttcaactccttacccatgtaaagagcacattgaacaatgctagtgtttctgtgaaatgtactcatcctttagtacttattcattctcgagctagtcctagaatcggtgaccaactcaaagagttagataaaatatactctccatctaatcatcatattcttctgtcgactacacgattccaatccatgcattttaccgatatgtctagttcacaagatttgtcttttatttatagaaaaccagaaactaattactatattcatcctattctgatggcactattcggtattaaacttcctgcgctcgagaacgcgtatgtacatggagacacctatagcctaatccagcaactttatgaatttagaaaagtaaagtcttataattatatgttgttggttaatcgtcttacggaggataatccgatagtgattacaggtgtatcagatctaatttccacagagattcagagagcaaacatgcataccatgattagaaaagcaattatgaacattagaatgggaattttttattgtaacgatgatgatgcggtagatccccatctaatgaagattattcatactggatgctctcaagttatgacagatgaggaacagatattggcttctattttgtctatagttggatttagacctacgttggtttctgtggctagacctataaacggcatcagttacgatatgaaacttcaggcggcaccatacatagttgttaatcctatgaagatgatcacaacatccgacagtccgatttctatcaattccaaggatatttattctatggcattcgatggcaatagtggaagagtggtgttcgctcctcctaacataggctatggaagatgttctggagttacacacattgatccattgggaactaatgtgatgggtagtgctgttcattcccctgttatcgttaatggagcaatgatgttttatgtagaacgacgtcagaataagaatatgtttggtggagaatgttacaccggctttagatctctaatagatgatactccgattgacgtatcaccagaaattatgctaaacggtatcatgtataggttaaagtccgcagtttgttacaaactcggagaccaattctttgattgtggatcgtctgatatcttcttgaagggacattatacgattctatttacagaaaatggaccctggatgtacgatcctctttctgttttcaatccgggagctagaaatgctagattgatgcgagctctcaaaaaccagtacaagaaattatcaatggattcagacgatggtttttatgaatggttgaatggcgacggttcagtatttgctgcctcaaaacagcaaatgttgatgaatcacgttgctaactttgacgacgatcttctaactatggaagaagccatgtcgatgatttcgagacattgttgtatcttaatttatgcacaggattatgatcaatatattagcgctagacatattacagaactattttagattatgatatttaaatgagttggtacgaaaaatataacattgtactgaatccgcctaagcggtgttcttctgcatgtgcggataatttaactactatattggcggaggacggtaaccatattagggcgatactttattcacagcccaaaaaactaaaaatattacaggattttctggcaacgtctagaaataaaatgtttttatataaaatattggacgacgagatacgtagagtgttaacatgaatctacgattatgtagcggttgtagacacaacggtatagtatctgaacaaggatatgaatattgtattttttgcgagtcggtatttcaaaaatgtacaaaggtacaaaaaaagtcaaacttccacgtgtctaataaacttattcatttgagaaatgtattgcggagattattgtctcatcaatgttctggagaaattatctcggaactcttggatatcatggaaaaaaatcaaatatccacggatgatgtagatgcaaattttgtatctagttttcttaaggctaacgagagaataaataaaaaggattataagttagtctttgaaataatcaatcaagtaaaagatgagaaactgaatctgagtaccgaaaaaattaatgaagtagtagaaatatttaagcacttggtattcttttgccaagaaaacactccttctaagacaattaattattcattctttttggataaaatattcgatatcacttctgtaactaaaaatctaaaacctcaaactgttaaaaattatacgaaaaataatagtaaccaattagtatgggaaaactttttagcacatatgagatctaaaaaacgtgttactatggtagaggattatggacacgagtacgtttttgtagatgagaggttttctacttgctcattagaagtataaaaaaatagttccgtaattaaatggctaagcgagtaagccttccagatgtggttatttcagcacctaaagcagtttttaagcccgctaaagaagaagcactcgcttgtatactaccaaagtattataaatctatggcagatgtgtctattaagacaaatagtgtaattgataagtgttggttttgtaatcaagatttggtttttaaacctattagtattgagacattcaagggtggtgaagttgggtatttctgttctaaaatatgtagggattcgttggcgtctatggttaagtctcacgtagctcttagagaagaaccaaaaatttctttgttgcctttagtattctatgaagataaggaaaaggttataaatacaataaacttactaagagataaagacggcgtttacggaagctgttactttaaggaaaactcacaaattatagatatttctctacggagtttattgtaagctttttccattttaaatagaaaatgaataatactatcattaattctttgatcggtggggatgactctattaaacggtctaatgtcttcgcagtcgatagtcaaattccaactttatatatgccgcaatatatttctctatccggagttatgacaaacgatggtccagacaatcaggctatcgctagcttcgaaattagggatcagtatattactgcgcttaatcatttggttctgagtttggaacttccagaagttaaaggtatgggaagattcggttacgtaccatatgttggatataaatgtattaattacgtatcggtctcttcgtgtaacggtgttatttgggaaattgagggcgaagaattatataataattgtatcaataatacaattgctttgaaacactctggatattctagtgaacttaatgatatttctattggcctaactcctaatgacactattaaagaaccatctacagtatacgtttatattaaaactccgtttgatgtggaagatacattcagcagtcttaaactatccgattcaaaaattaccgtaacggtaaccttcaatccagtatccgatatcgttattcgtgactcttcgttcgactttgaaacgttcaacaaagaatttgtttatgttcctgaattgagctttattggatatatggttaagaatgtacaaattaaaccatcgtttatagagaaacctaggagagtaataggtcaaataaaccaaccaacggcgactgtaactgaagttcatgcggcaacatcgctctctgtttatactaaaccttattatggaaatacggataataaatttatttcgtatccagggtactcacaagatgaaaaagattatatagatgcatatgtgagtagattgttggatgatctagttattgttagtgatggcccaccgactggttatccggagtctgccgagattgttgaggttccagaagatggtatcgtttctattcaagatgctgatgtgtatgtaaaaattgataatgttcctgataatatgagtgtttatcttcatactaatctgctaatgtttggaacacgaaaaaattcttttatatataacatttctaaaaagttttccgccattactggaacatatagtgatgccactaagagaacaatctttgctcacatatcacatagtatcaacatcatcgatacatctattcctgtaagtctttggactagtcaacgtaacgtctataacggagataatagatcagccgaatcaaaggccaaggatttgttcattaacgatcccttcatcaagggaatagattttaagaataagaccgatattatttctagactagaagttagatttggaaatgatgttctatattcagagaacggacccatctcgagaatttataatgaactactgacaaaaagcaataatggaacaagaaccctaacttttaactttacaccaaagatattctttaggccgacaactattacggctaatgtatctagggggaaagataaactatctgttcgagtagtttattccaccatggatgtcaaccatccaatctattatgtacaaaaacaattggtagttgtatgtaatgacctgtataaggtatcttacgatcaaggggtaagtattaccaagattatgggagataataactaataataatgaaaacaaactatagagttgtaaatggatgaaattgtaaaaaatatccgggagggaacgcatgtccttcttccattttatgaaacattgccagaacttaatctgtctctaggtaaaagcccattacctagtctggaatacggagctaattactttcttcagatttctagagttaatgatctaaatagaatgccgaccgacatgttaaaactttttacacatgatatcatgttaccagaaagcgatctagataaagtctatgaaattttaaagattaatagcgtaaagtattatgggaggagtactaaagcggacgccgtagttgccgacctcagcgcacgcaataaactgttcaaacgtgaacgagatgctattaaatctaataatcatctcactgaaaacaatctatacattagcgattataagatgttaaccttcgacgtgtttcgaccattatttgattttgtaaacgaaaaatattgtattattaaacttccaactttattcggtagaggtgtaatcgatactatgagaatatattgtagtctctttaaaaatgttagactgctaaaatgcgtaagcgatagctggttgaaagatagcgccattatggtggctagtgatgtttgtaaaaaaaatttggatttatttatgtctcatgttaagtccgtcactaagtcttcttcttggaaggatgtgaacagtgttcaatttagtattttaaacaatccagtggatacggaattcattaataagttcttagagttttcgaatagagtatacgaagctctctattacgttcactcgttgctttattctagtatgacttctgattcaaaaagtatcgaaaacaaacatcagagaagactagttaaactactgctgtgatttttaaaacatagttattacttatcactcataaatgagtaaatcacacgcggcctatatcgattatgcattgcgcagaactactaatatgcctgttgaaatgatgggaacagacgtagtacgcctcaaggattatcaacattttgtagcaagagttttcttaggattagacagtatgcattctcttttattgttccatgaaacgggtgtcggtaaaacaatgactactgtatatattctcaaacatcttaaggatatttatacgaattgggctattatcttattggtgaaaaaggctttgatagaagatccttggatgaacactatactcagatacgctccagagataacgaaggattgtatttttattaattacgatgatcaaaattttagaaataaattttttactaatatcaaaactattaattccaagagtagaatatgcgtcattattgatgaatgtcataacttcatttctaaatcattaatcaaagaagatggtaagatccgtcctactcgttcagtatataattttttatccaagaccatcgcattaaaaaaccataagatgatttgtttatcggctacacctatcgtcaatagtgtgcaagaattcaccatgttggttaacttactacgaccaggatccttacaacaccaatcactatttgagaataaacgtctagtcgatgaaaaagaattagtctccaaactaggaggactatgttcgtatatagttaataacgagttttctatttttgatgacgtagaagggtctgcatcattcgctaagaaaacagtattaatgcgatacgttaatatgtcgaaaaagcaagaagaaatttatcaaaaggctaaactcgctgaaataaaaacaggtatatcatcatttagaattctgagacgtatggctactacgtttacgttcgatagctttcctgaaagacaaaatcgtgatccgggcgaatacgcgcaagagatagcaacactatataatgattttaaaaattcattaagagatagagagttttctaaatccgcattagatacctttaaaaagggagaactattgaaaggggatgctagtgcggctgatatctctctatttactgaattaaaagagaaaagcgtcaaatttatagatgtatgtttgggaatattagcatcccatggtaaatgtctagtctttgaaccatttgttaatcagtcaggaatagaaatcttattactatatttcaaagtctttggtatctctaatatagagttctcatctagaacaaaagatactagaatcaaggcggtggctgagtttaaccaagaatcaaacactaacggagaatgcattaaaacatgcgtattctcttctagtggaggcgagggtattagttttttctcaattaatgatatcttcattttagatatgacatggaacgaggcgtctcttcgtcagatagtaggaagagccattcgtctcaatagtcacgttcttactcctccagaacgtagatatgtaaacgtgcactttataatggctagattatctaatggtatgcctactgtagacgaagacctatttgaaatcattcaaagcaaatcaaaagaatttgtccaattgtttagagtgtttaaacatacatcattagaatggattcatgctaatgaaaaagacttctcaccgatcgacaatgagtccggttggaaaaccttggtttcaagagccatcgatctatcgtctaaaaaaaatattaccaataaactaattgagggtactaatatttggtattccaattctaatagattaatgtcaataaatagaggatttaaaggcgtagatggtcgagtatacgatgtagacggtaactatctacatgatatgccggacaatcccgttataaaaatacacgatggtaaattaatttatattttctaatcaatcatcctcagttaatttttttaatgattcataataacatcctctatggccgtaacatttaagttttgcagtatctagagcatattttgcaatttcgtattgtagtccattacctgaattcggatctaaaaatattagatccttgatttcatgattacttttaaatgtatcaatgatttgatcactcgttagagatattcttccgacaaagaagattacctcaaaaaatttattaataatggtatcttctatgatgccatgaataaaaaaccgagtgtctatgaatacaaaagaattgtctatattaacttcttctttaatttccctggataaacactctggaacattctcaccccttttgggtatgccacccggataaatagcgtctattctatcattatcagcagtagctggatatagagaaaaaaatgacgatagtatacttctttcctgtttggacaaataattggaataattcagaaataatcgtttctttctaaacatgtttctagttctaattatttcagaatagagaaaactatctcgtctgttacatactaatattttgttatcagtagttaataaaatagcggacacggatactcgtttatgacaccataggcattggttaacgaatgccgtgagtgtaataatttgagagtcatcctcgcaaataatagacttagctagtcgtctattatacttaataatctgactaattatactagatctgtaaaagttcatttactattaactagcatattataaatataagacagatattcgtatttatcgtcgttaatacaatcatttaatgatttaatctttctaatttctacattgtaaatactagtatgcgataaatcctccaacgattgattaataaaacacgccatgcaataacttatatatactttattaaataatttatcccgtgttgtaagttttagaattacatttccaaattcttttactgttatacgttcatcactttcctcttttaattctcttcttaaacaatctttaatagattcctttttatctagtttaccacccaataatattaactcttcaaagtgaggatcgatattgttgatagaaccttttctcaaccgtctaaagatttctcttagttcattgtagtacataaaccgtaatagtttagtggatactctaaagatagaatctgaattttgttgagataatatcgcctggaacgcgaatgaagttcttctagctcctattaacggatatccgtcacttgttatacacgcagcaaacacatgcgtgtcttttgatcttggaatatcttttattcgtttaatagatattaattctctaggagtttcaaatatcacttcctcatccattgtaattcccatactaagagctatttttaaacagttatcatttcatttttactatgccgcaacaactatctcctattaatatagaaactaaaaaagcaatttctaacgcgcgattgaagccgttagacatacattataatgagtcgaaaccaaccactatccagaacactggaaaactagtaaggattaattttaaaggaggatatataagtggagggtttctccccaatgaatatgtgttatcatcactacatatatattggggaaaggaagacgattatggatccaatcacttgatagatgtgtacaaatactctggagagattaatcttgttcattggaataagaaaaaatatagttcttatgaagaggcaaaaaaacacgatgatggacttatcattatttctatattcttacaagtattggatcataaaaatgtatattttcaaaagatagttaatcaattggattccattagatccgccaatacgtctgcaccgtttgattcagtattttatctagacaatttgctgcctagtaagttggattattttacatatctaggaacaactatcaaccactctgcagacgctgtatggataatttttccaacgccaataaacattcattctgatcaactatctaaatttagaacactattgtcgtcgtctaatcatgatggaaaaccgcattatataacagagaactatagaaatccgtataaattgaacgatgacacagaagtatattattctggggagattatacgagcagcaactacctctccagcgcgcgagaactattttatgagatggttgtccgatttgagagagacatgtttttcatattatcaaaaatatatcgaagggaataaaacattcgcaattattgccatagtattcgtgtttatacttaccgctattctcttttttatgaatcgacgatattcgcaagaaaaacaaaactagattcgataccttgttgagcctccattagaacggcagtgacttcgctgccattgtcatacgcattaccatttcgaaaaaagcagtactttgaatcgctaaatgatacagtacccgaatctctacttagtttacagattaaatctccacattgaatagttacatttgattcatcttcgatgtttaatgttcctctgactatatccccaacgtgataatacgcgtaggttattacacacggaacgtttataactacagaattattaactatttcgccgagaggtaattccacgtcttcacgaatttctattttcttggccattttaccactaatttctctatggagatacgtcttatatacggcattcctaatattagtttttatgtctaacgtcagctcatgaggttccaatgtaactggaaggtatccattggtaacaaagctcgacatttatttctttatatatctcatcagttttatggagaagataccacgttatattctttacgaaagttaactccccaaacaaatggttcgtaggaaagtctaaacggtactgtaataatatcgttttcgtatttgtataaaagagatttatcaaatactttattcgatacaaagaagtgaccgtttacaatatcatctatgtaattcctagcgtcttctttattttttataactgatgtaaccattttaagtaacttggagtcgttatacttaatacgagaattattataaaaaaattgtctgaccaattctcccaataaaacttttacaattgatggatgtggtggaagagaatacgtttcagacatctcttgaagaatagagtatattctattcgtttctttcgtcttaaattttagatataacagctttttgatgtcaaatggtaaaacattaattaattcatcctgtgtgtaatcgtttaatgacgtcacttcgtcattgaaatcggaatatacggcggctaaaagatatacattaactggttcagaaatatcggcgtaagagaattttctaatagatcgtccaagaatttggttgtattgagaaaaagtatctgggatagtcataaaccaaatatgccttacctctttcagagtataggattcggacataatgtttgacgaaaacaaaaacatcaattgactgccatcatcgttttcaggagaattatacacatctaatagatcctctaaagacgatttcattttactagtaacgatagcaaatgtttttggtttgccgtttatcatatgtggattagttccctgagaaccattatattcagaatatccattactgagcatgatatatttaattaccaatccgccatatgtagaattagaaaagtatataaaatgttttccgttgagtgtctgtatccgattaataaagtatttaaatttggaactaatgtttaacgttaccaattcttctccgtataacacgccattatttattttcagatttgggtacaattccttatcctgttcctgaaataaagtatctaaattattcatcagattaagttgtcccaatactgccattgacacgttatacatatttttatcaaacatttcatgataacatagctgtcgtctagtaatcatataatctctctcttgaagtttagacatgtgacaatatactactctagtatctagaaacttacgtccgtgatatcttatcgttggtagatctttatcaggcatttcgtaatatgatattcttcctttaagcaaatccttaagtacattcacacctcgttcgttaagaagtgtctgaattactttcttaccacgactaataatttcaccaaaatctatcgtctcttcggacattaaatctataatatgacccagagtattaggtgtgttagtaatgggagatccagacaatagtaaaaaaggaatcttgtttttattttttatcacggtcataagttctccagtattattcccaaagatattatgtgcctcatcaacgataaaaatagagttattgtagcgagataatccgttataattaatgacgttatcgttataattaagagaataaaaacttgttgtggaatgaataaagatattctcagctatgaatttgtcattaaacaagttcatagctacacccatattataattgaaaatttttaagatgttgatgttcggcactagaatgtaaacctttttaaatctggaagctaccaaggcgaacaacaaagcgattattgttttacctgatcccataatatggaacaataacacgcttctgttctcatctatgatagttctaactagataatctagagtagctaactgatgaggtaatatagttggtatactatcaacatgattatcaaataaatctatgattccggtattcatttagatatgtgatatcttctataaatatatgagcatatatttacggagatgaaatatcctctatgaatatatattgcagatattcatcactaacattggcaaatttcttatgtctattgatgaagctctctatatcgtgtccaaatagtctagaattaaaatacttggatattttctgttggaaagtagtcaacggaagagtaaccacattatcgtacaatatatatccctttttggagaggtccgtcattaatggaatatgctttacagagctagatactaacagagtacctattttgagatagaatgcaaagtcaggaatctcttcgggtgtaggatatagtttcataataggaacatgatattttctgtaccatttcaccaacaagtatagaaatgcgaatctatatctattattttgtattttaccatctaacccctcgtctaatagtttgactttatcgtacgcgtcattattttcagcagcctctctaccagaaggttgagaaaagtgtgttctgaatcgcacgacggcaattcttctcattaatgcgttatctatcctatcaaaaacaggtttgtaattagtatcgataatgattgtcgcatggtttctattattaattttattggagaaacacggtcttccaatgacacaaggttctgtcaactttttaatattgtcagatctaattttctttgatccactacaggcaaaatcaggtagttcgctacagaatacagatcttttcaaatgcatgttagcgataaatggattaggtcctttatccaatacatctgttaaaattgtttgacccgtctcaacaaacaagtcaccgatagcagactttaacaaacgtttggttgtcgactttccagttgcagtttctccaaaaaagaatgttaaacatcctttggtagcaccgcataaacaactagataaagttttttcgtacaactctctatttttcttattttcatccgttaatggttggatatcgttaatgatattcattaactcttccatttctggactgtcttcgacgaactttgtatcgtcaaatttaaatccggttgatacagtacacgtatattttttagcattatctccagagtaaaacattccgtctaccaggtccaatacaccatttttaaacggaagtttatccggataggtatcggtctccactgaatctactaacatgtctcgtatgttagcttctacagtctttcgttttcttggacagagtaattcgcttgaatattccttaggtagttgatgtcttattgacaaaattagttttgttatcaagggttcttcgctgttaaatttccatgaattattaatccaaactatatggtctcctcgttcggttaataaaacagagttagtgtctaaaattctttgtgcaatattaaacagtttattaccatccaacggaacaattttaactttacaactatgtggattaccagttttgtaaattctaatagcaccattttccaacgatagttgatgcggatgtttatgcgatcgttttttacataatgcacaaggtgttacgtaatctatgaccagtggtaccgttgtaaaattattttcatcgagatcattaaagtttattatagaattaatgaatatttttgaaactctttttatagcgtcttcgaatgaaataaaccctggttcccataacttatcaggaactaaatcctccaatcgtcgttgtagagaaaagtaataactattgttgttcatatccacgtaagtgaataggtaatcttctatattatcatgcggtggttgcattacatgaatagtgtcgcaatttggatttttcctagtacctacaacccgaagagttgtttttctcctatatacggcagtgtctatcgatcttgttagtggattttcagatgatctacttaattctaatagtgttcgtttcatagctatcaatgtatccatagtggtatacgtgtctaaaaagataatatgaaaacttgttttatctctatttgtagacttagtcaatgaaaaattagatctcatggattttattacattttcatgaatggcaccgcattctgtaaacgcgaatctagctacacagtttgacacctcgataataaaatcttgaatagccgttaaataatctatttcgtctagacacgcgtctaaatctacatccatgaaaattctgactatagagtatgcttcctcatccctaagactttcgaatagtgtacattctggattattctcaatatatctttttaactcgtcgcatttaaatgcttctacgaatcttggatcttcattttgtctacatgctgatgggacacctatagtcttaaggacaaaaataacatcattacctctaatagttgcatccatttagaacacaagttaaaatttcactaaagcattaataaataaacccttgagcccaatttataggtgccttgttgtctaattccagtaaaacgttgataatttcaaatgatctatctttctcgaattggcggtctctagccgctggatgatatccgactatggtagttaccggggattctaacttggcccgtatattcgagaaatctgttttacccaaacaataaagaacactaacgtgtttagttatatgctgcagcagtaacttggaaatcttatcccagtagatcgcgtgactttttgtttctcctaatttacaacttaagtaataattccagggtataaccccgtctattatattaaggttataacctttataatcaattactccggttaatctagatatagatgaagctatctccttaattgatttttttgtaaaatttggtgattcgaacggtacaccagttccatctttcggatacggatctataccgcacacacatactcgtttatttctaagcggttgtttcaactgtataaagaacttatcaggaataggcgacgtctcgtctcgtagcagccaactggctacttcgttataaaactctaccaattgactcattactggtttccaatcatcgtgataagtaatagtatatggcgcgtgtgatacagtcactgaattcattatatcaaattagatacctttttatacgtatctagtaccttttcattttccgaaacgccgttaaaccaagcgaatacaaacgccttaaacttatctctattataacatattctcgttagatttaattcttcggtatccttgtatctaactattgttatatgtttagaaactctatagtggcttctaatcagatgttctaataaatattttaaaaatgaatcttgattaaaaatcatatcattgaccatttgtctggctactgaattacgataatacggagacaataacggattagtcaaatagctatcatctcctaatgatggaggcacctgtacgaataccaatcgtttattcttgaacgaatcaaacgtataaatatcataaatgacaaatttatcagtgtgcatatcttcgggtatatctttagatatatgattggatgtagaacaccatctaacttgtcttccagcatctataaattcctccacctctatatatctaccgccgtgctgaaaactagacccatttaattcgacgcataaagatccatatgtatctggagtcacaatatattcagaaaaaaatacatgctcctttaattttgttaattttaatctgataaagtcattgtgatttcctaaaagtataaatacttcgttatcgtcgttatcgactttgggatacttattatccttaactataaaaatgtccatcaatatcgatataaaaaaaataactgatttactcaacagtagtattttattcccagatgatgtgcaagaacttcttcgagagaaatatatagtattagaaagaaaatcaaatggtacacctacagtagctcacatctataagacaatggctagatttgataataagagtatatatagaatcgccaagtttttatttatgaacaggccagatgttatcaaacttttatttttagaagacgtagaacctctgttacccgacaaaagtattaatatatctattaacaatacagagtatccacagttggaaggtcctataggaacaaaaatcgctctattggaattatttaatgcatttagaacggggatatcagaacccataccatattattatttaccgcttagaaaagacataaacaacatagtaactaagtaagtcttcgacatctaaaccttcacatttaatggctcctctatttagttcgaaaaagttttttgtagacggtctatcttccattgtagatgcgccattaataaactttttacttcgttctataattgtagcgaaatcaacgttatctacaagaacaaatccgtattcgttaaacactctgactatatcgttctttttgataatgtattcagtcattggagtagacattgttgatggattatataccactattctatcatcagctattttttctacagacatatagttttcgctactaggtaaattcttatgaattataaaagtctttttatctgttaattttgataatttgtctccgtccatggtagtgattaataccttgcctccagaagcagttagttcggataagttattcatgacggtagcataatgtctcggatgaaaagaataatggatagcaaactgccagtcgatgatattaaactttccaaaatagaatacttctctgacactagagacaaatgtatcggatcgaatagtttcctgaatgtagtcaaatttgtagtacttggttttaattccagagtttaatttgttgtatctttcatttcctctagctatagcatcagcatccggatccgtcgctaccaataacgcaatctctccataaaagtatttttccaggtcagcaccgtttccaaaatcaatcgccaatacctttcgtttgttggaatcgtctaaaaatgttttggaacaatacatagaaataagaagagtcttgacgtagtttgataaaattcccaacggtcctctagttcgtttattcgtaaaataactaacttctggatttaatctaaatttatcattattggcgtattgatgtcccacatccgatagtttatcctcgttaaagatatctcctattttgatgctttgatctcttaaatgttcgactatgatattatgttgatttccataataatcttctgagttaatatatttcatggttttatcaattctaggtttaagtatttctccattaactaagaattctgctataaacttaataggtacaaccacggacttaatacccacttcattatgtgtattaatatattccaaacaatagatattatttagataattaacgccgttatataacacaatcttaccagaaccatattctttaggaaagcctttatcgttgctaaatttcttatactctacaaagatagacgattctccaaagataattggttcactggacatgtacctaaatactacatttgcagtttggtctatagtattttcctttttaattttaaaatcaatgttagatttaggtccctttgaatagaacagaataacaccttctggttgctttggtaaatatgtagataacatatcgacgacttcactagttgtagtaaacggaccttcgtatttctttgacttgaatactatccgatcacaaatatccactagtttagattcaacatacttactttcttctagtctatcattgattgcattcacaggctctattagcttaatgagatatacggtccagttcttatccttaactgcctcaccaaagactactacttcggaatctattattctcttaacaggatatctaataatataaccaagatgtgtaaaataacaatacaacccgtttgatgtaactctgatagttataggaatgccgtcagtcttagttacggcatatagattttccagatccaaacctactatatcttgtttaggcaacataaaggtttttataggcgcgttaataggcggagaaagaattacattctctggagaagccataaatatatgacgcgagagagtcgtcaattcctttattagttcatcatatggaactttttcattgtctctaggtgtgaattctatttccagagatgtattaggccttgactttggatgattaatagcgtgcaacaaagaacttttagattgggcaccggatcctagaaaatattttagcttaaagtctatcgtaaagttttttgtttttgcttgaataagattgactaattctagtcggatagaggatccatatttcttgtaatccaaaaatatatgacgttcctctgtcgatagtctcaacaagcattctttgtgaagacgattttccgtcactaatgatttcttttcccaaactatgttatctatagcatctactaactgtacattttttacatctagaccatgtaccttagataatggaatcttagttctaattttaacaccttccttattagtaacggtaaatcgaataaacgattcctgaatcgtagagatattcactacatttgtcaaagtaattaatggcggcttaataaatactagttccaattcattatttatttcgtatgcggtagacctctgttctaattctgaagcattcttcgctaaagcgtctatatacgttgcaatagtagaagatgatactacgttggcatccatatcgtgttttattataaacgactagttttttttcatttacttattaacaagcgtcttttatatattcgtaatctatgcctttagctagagctattttaagcttttctgtatctcgactgatacgagtatctgatctattgcggtatttttttataaatcgtttaagacggggagtagttttgatatattcgctaatatcctctttaataatatccacacacgccaattgttcggctatactcgatgcgtgagtcttgcattcatctccagatatcggagtgagggtcagatccaaatattgagaagccttataattatcgtattcgaaatcaatcataaactgaccatccttatccactgaaaaaatggtattgtttggatggcgtttaaatatagacattatcaatgccataatatctaatgtgcttagctccccaaagaaagcggtcattgcgagagattttatacgcttatccatttccatttatcggtcttgtaattatttgtgtaaagatctatatcatccatccgtagatgatttaacgtgatctacgactatagataggaattcatcgaacgtagttttagatactacatctaaaaaatttttatcctttaccatttctaaaatagtcgttgccatataagctctttttgaaattgatggagtatgacctacaacttcagcagtttgtttgatagttaatgctattaacttttttggtgacggaagaggagatatggactttacatttgtccaaaaattatataaaaacgtataattgactccatacgttcggagatccttgattctaataccaaactgtttgatacattcgtatacctttcgttcacttagtttgttgaacagaaattcttcgggactagaatcatccgtcagtttcaatagcggtttatatagtctattagacttatgaacaacaaattcatgtgaaactttgtcctttcctacaaacttgataactatttcatcgggacttatttctatgtgtttattttttagtgttaataaccctactgtttcattctccttaagatatttcattttaccaaatctaataaaaaacatagtttccattaacataaaaaccgccaactgataattggaatctgtggacgatttctttatatttttgtttataaaacaattaattcgtttcataacgttatatactctaacaaaaatacgatctcttttagcgttgcgattctgtacatgcatttttccgtaaaagtattgtctacgtccttttgaatcgcttcccacaaaaattaatctagttaatgcctcttcccacgtttgttcatatactactacatctgttaaatgagtaggaattttaacatgttgcaaaacctcatacgctggattatcatctaatacaggatttaaaaaattattatcggtaaagagtttaccatctttataaaaaagtgcacgcatttacttcttacaagttttaacttttttacgaacaactttagattttccctcggtgactagatcagatagtgttgtaatagctttagtcatagaagtaaattgtctagagataccagctgcttgaacatcctctagaaccgtcgatactgcagagattctagtaataattttcttaagatctttaacgatattgtcggtagccacctttaggtcagaaagatcgcttctagcactatgatttactttaccagcttcaacttgtaccataggttcatcatccccgtcgctatcatcgagctctacagcagccacgctttctacaatgtcgccgactccaggagatggagaatttttttcagttgtttgatgatattcctctataactacttcttcttccacttcctcctttttggttgatcttttagtagccgctggtttacgaggagtagtggctcgtttggttttgggcttagtagatggaattattacatcttccgggaaaatatcctcgtttttatctttattttcagcgctattttttagatgagctctgatttcagccatctttgtgaagctactagtatccgctttatttgtaattgaccacgccattacgatacaaacttaacggatatcgcgataatgaaataatttatgattatttctcgctttcaatttaacacaaccctcaagaacctttgtatttattttcattttttaagtatagaataaagaatctataaaaactaaaaaaattatacatcataaaccaatttcctagttgtttgtaactttaaatggactctaaagagactattctaattgagatcattccaaaaataaaagcatatctactagacgcgaatataagtccaaaatcctacgatgactttatttcacgaaataaaaatattttcgttatcaacctttataacgtatcgactatcacagaagaagatatacgattgttatacactacgatagaacagaatattgacgcggatgatcaaacactggttgctattttttcgtatataggatataaatttgaacaggctgttaaagaagagattagtacgagtttatccttcaatgacaagaataccacagatgaaatgacgtataacttgtatgatcttttttttaacacattagacatgtatttacgacaaaagaagatcagtattctggtaaatgatgatgttagaggtgatgtaatcgttagttataaaaatagtgacttagtttcatcatttaatgcggaactagaaccagagattaagaagataccgttcaatatgaaaaatctattaccgtacttggaaaagaatttggaccaactaagattctctaaaaaatatttagactttgcatatttatgtagacacatcggtattcccatttccaaaaaaaagtataatgtgcgatatgtatttctttataaaatagacggattatccattcctattatcattaaggattttttagatgttaagtacgtatatttggaaaatactggaaaaatttataaaaattctttttccgaagaccataacaacagtctatctgattggggtaaagttattatacctctcttaaaggatcgtcatctatatagctacatctttctatctagttatcatttacatagttactatacagatctcatcgcgagagacgagcctgtgtttgtgaaacgcaaaaaactagatattatagagatcgatgaacctgaggcatggaaaagggatgttagagtggaattcgcaccgtgtgagcatcaaattagattgaaggaagctatgaaagttgacgctaactatttcactaaaattaataattttgctaacgaatttatttattatgaagatggtgtggcatattgtagagtgtgtggaataaatatacctatatttaatttagatgccgctgacgtgattaaaaatacagttatcgtttccacgtttaacaagactatattcttgagcgaaccatatagctatttcgttcatagtcagcgctttatctttaatattatcatgtcttttgataatattatgaaatctcaaacttgggtaatgaaatacaacattaaccgactaattcttaactttcttattgatataaactctagacgtcaggaatacgaaaaaaagttttcttctgaaattaagagaggtctgttctttcttcgtttgtctgcaaacttattcgaaagtcaagtatcgtctacagagttattttatgtttccaaaatgcttaatttgaactatatagttgcgttagtaatcattcttaacagtagtgcggactttatagtttcctatatgacatccaagaacaaaacggtagaagaatccactcttaaatacgccatctccgtggttatatacgattttttggttaagactagaatttgcgagaagggatcgttggatactatagttttatttaccgatgtatacacatctataatgccggaggaattggatttacattttcagagaatcacattagaacttagaaaactagtatccattcagagatcggcgttagaacccaattacgatgtagaaagtcgcggcgaagagcttccgctatctgcattaaagtttttcgatacaagcaccattatagttaaaacaatggctccagtacatacatgtgtagaacaaaaaattgttgcacctactccatctgtagaaccaactgatgcatctcttaaaaacttcaaagagctaacgtgtgacgaagatattaagattttgattagagttcatgatactaatgctacaaaattagtcatttttccatcacatctaaaaatagaaattgagagaaaaaaactaattataccgctaaagagtttatatattaccaatactctcaaatattattattctaactcctatttatacgttttcagattcggagatcctatgccattcgaagaagaactcatagatcacgaacatgtgcaatacaaaataaattgttacaatattctaagatatcatttattgccagacagtgacgtgtttgtatattttagtaattcattaaacagagaagcattggaatacgcattttatatctttttgtcgaaatatgtaaatgtgaaacaatggatagacgaaaatataactcgtattaaagagttgtatatgattaatttcaataactaaatggcggcggtgaaaactcctgttattgttgtgccagttattgatagacctccatcagaaacatttcctaatgatcagaagttcgatgatgtaaaggacaacgaagttatgccagaaaaaagaaatgttgtggtagtcaaggatgatccagatcattacaaggattatgcgtttatacagtggactggaggaaacattagaaatgatgacaagtatactcacttcttttcagggttttgtaacactatgtgtacagaggaaacgaaaagaaatatcgctagacatttagccctatgggattctaatttttttaccgagttagaaaataaaaaggtagaatatgtagttattgtagaaaacgataacgttattgaggatattacgtttcttcgtcccgtcttgaaggcaatgcatgacaaaaaaatagatatcctacagatgagagaaattattacaggcaataaagttaaaaccgagcttgtaatggacaaaaatcatgccatattcacatatacaggagggtatgatgttagcttatcagcctatattattagagttactacggcgctgaacatcgtagatgaaattataaagtctggaggtctatcatcgggattttattttgaaatagccagaatcgaaaacgaaatgaagatcaataggcagatactggataacgccgccaaatatgtagaacacgatccccgacttgttgcagaacaccgcttcgaaaacatgaaaccgaatttttggtctagaataggaacggcagctgctaaacgttatccaggagttatgtacgcgtttactactccactgatttcattttttggattgtttgatattaatgttataggtttgattgtaattttgtttattatgtttatgctcatctttaacgttaaatctaagctgttatggttccttacaggaacattcgttaccgcatttatctaacactattccatattactaaaatcggaacaccaatgcggtgacataaaataaccgctataacctaattcatttaacatctcattaccacaagtaataacattattagacttgtgttttatcaaatactgacaaaattgttgagcagatggatcgacctttgccgcctttttaaccatccacgcgtctccagtacctcgcctaatagcttgcggcagatatgttttcttatccaatcgcatagctataaaataggcgccgaaatccacacatttgaattcgaatatatcatccttaccagcggctagaagtctacctctatcactttctaattttgttttgctatccgttaatgatttccaatcgttaaccgtatttttaattcgcatatatctcgttaattcattaaagactggattatcagacgtctgaaaccagagtaatagcgcactaattgccaatataataacaaagaatataagtgttgatgttttggctgcttgtacgcctactatagccttttctctaacgtattctaaattacacgcgtttaccgataaagtagttttatccatttgtacgttataaatggataagaaaagtttgtataaatacttactactacgttcaactggagatatgcacagagccaaatctcccactataatgacaagggtaaccaataatgtgtatttgggaaattataaaaatgctatggatgcaccatcatctgaagttaagttcaaatatgttttaaatttgacgatggataaatatacattacctaactctaatattaatattattcatataccgttggtagatgatacaactaccgatattagtaaatattttgacgacgtaaccgcctttttatctaaatgtgatcaacgaaacgagcccgtgttggttcattgtgctgcgggagtaaatagaagcggggctatgattttggcatatctaatgtctaaaaataaggagtcattgcctatgctatattttttatacgtgtatcattctatgagggacttgagaggcgcatttgtggaaaatccatcgtttaaaagacagatcatagaaaaatatgttattgataagaattaaaagtcttctgtttcttccatttccttgatcttttgagaagatatcttatcagatagtttcctttccattctcatgagaagacccaagtcgataaagtatttgtaatatccagttcctatattagggaccttgctaaaaaagtggcagctactattatcgttaataggttctgactttttatgaagagccgcgtttaacaatgctttattgtctccgaacgtagctctcttaagagtactagctgcaccgaacttgaatttattaactgattctggttcgtaactagcacatagtaaactagcgagaagatcacaaggctgatacagataatcgaacccttctccataggtgtttaacatggcttcgcacaagtattcacgagcggcctcgataccgaagatatcgtatgtattccatactccaggatacacgttgacgttttccaaatcgaaagaacctaattcttttagattcatgagttctacagtcatcttattgagcttttttgtttgattgaagtcgtcatatcccgtatagtcagagataggaatcttgaatttactaatctttcccttgttggctgcccccggaagaaccatcataaacttactaagattcaattcctctggttcaacgaaatttagatagacagtaaatctaatattatcctcgtcctcaatgaatgtctccataccccattcctttacaatgacgctaaaggagataaatcgttcaatcatatattcgacaactaattcggttatttctgctctcttgatgtataatctattaactattatatctactacatatttatctgtttcttttcgaagagtgatgtttggatttaattctcccaaacatacaaattcgaaattaatcttaacagattgaagtttagagatatcatcggataccagagtgataatttcggtcttattcttactcaaattagtcaagttattaaactcgttgaaaccaagtttttgtttgacggcaccacttttttcagtagtgtgaaaactggacagggcttgttgtgtaaacttctcagacaatacctgtgcagaaataattccaataggagttccaccacctagagtataattgagtttttcatagaacttttcaaagatagtgatagccgtttcttttgtaattctaattctagaaggattaagatgcgtcaagaatatatactccataaaatctatattagataccgtaaagaagtatttctctctcacatcatcaatgacgttatgaatcatatcgtacagatccttaaccttaatagcattatcctcagtggtgggtttgacgaatactaggaaattaaacggcgccaatgtcttttttgcaagtttctgtttctgagagtaaacgaatccctgttttattttattccacagagcactaatttccaaataccaagtcatggactcatctggatagataagatctacaggtttacatactgagcctagaattttggtataattggcggcgtacttgatgagcgtattacctataactacttgtccgtatccgtcgaccaccatatcctccatctttttaatgatttttctagccagtgttccggtacgtgatgtttcacagacgatatcagtagattgagatcttgcaaccagcatcgaaaagtaatattgagaacctgttaatccttttgttaaagaattaagaatataacctcttccttctggatccttagagtctggaagatagtaaggtaagactctacccaatactcgagtctctgctggttcaccatcaatcctctgttgtccataagtacctagaatatacattagttctgtgggatttactttataacccgctttggccattttcaggaggttattatctggatcatctatcagcgtttgtctcatatgttcttctatctctcggatattaagatttgtcaagttggataacatggattccacatagtccgcctctaaagctttagataatggaactattttcccgtctcttacatcgttgagatatttggcgtatgcttctttgataagttctattttttctacgttgatggcctccaatttattagtgaacgtcgaatttggtctcagatctttgaatgtcaccccaaaaccgtaaatagatagatatctcttaaaaacataagatgacttgataataaagttgataccttccacgttcgacttatgatcggataagagtccagccaatgacagatgcctcatagccacaacaaaattactatctacgtcgtttgcaataatttcaccatcctttaagagacccggataattaatcttttcacctatcaagtaagtatagatatctttaccgctgaatttacatttacctttaggatcgaactctcttccatatttccccaagatgttcaatacttcatctaaacaaagatcttgtatcctaaacaatgaatacgctgctacgatttcatcttgaatagatccataaacaggggctccatgaatatcgtgtttgagtaacgtcgtcggatacataagaatactttgttcaattacagctttaggattttgttctaatatcatccattcctcatccccgtcgaaatcagcattttgagagttggcaattccgggagatattttgatagtatctccttcggtagctctgatagatgaagcgatgacgttgtatctatgtagagacggctgtcttccaaaaataatacttgtatattcttgaacagctacttctacccaatcaccaggcaataaatgtattttatttttgataaactttccttggcgtattcttgttaattggtttaatcgtttattaaagtaaaatttaacttggtttgatgctaatagttgtttaactttatccactgtaaaggcattaacaaatatcttttctgtaagtgtatttctaatatatgcgggcattcctacctcattaacggtgatagatgtactgggaccaattacagatctagcggtctgatcttttcgccgggcgacgatataacttctaatcatattatttttgccggatgtgatatatgataaattgatactggtagtgttattagaaataattttaatatcatcgtattctattaccgccttctggataacctgttcatcagcattcaagttacaattcttaacgatcatacctaataagtaagttaattcattggtttctttgggtatactatctatccaaaaactaatagccggtctaataatcaacggagggatgggaaagtagtctgtataaaataagttagctggatattgatgaatttctaataatggccaaaacttttcatgaatagaaattaacttttgatagatgagagaattaggaacgttaatatcatccaacttgttgacgaaacaaacctttttctttgaaaaagtaattttttgatacggttgcatacattcactgttccaacatgactttttcttggataatattttatcctttaatctcctaagagcgtgtcccgataactcttttaggttaatatcgtcggaatacggttctcgtgaacgcaataatccgcagtgaatacatatataattcagtaaacgaataatttctgaaataaattcaggcttaactatatgagttttataaatacttactttaccccagtgaccgaaacattccaattccgttttcccacaagttttacataatgccccatccatagcacctagtctaccatctttaacggtaccgatatcgtcgtcatttttaacatgactaatgataatatctgtagcattaatctctttttgatcatatagactatacgtaaccttagagattacagccatttttatcaagtcagtttcttttaaagaaccgaaagtatacaatcaaatttccctttttattacaactataaaaataatagttatatttacactttaaatttttatcatgacggacgaacaaatttatgcattctgtgatgctaacaaagacgatatacgatgtaaatgtatttatcctgataaaagcatagtacggataggaatagatacaagattaccctattattgttggtacgagccatgtaaacgaagcgatgcgttgttaccagcctctttaaaaaaaaatataacaaaatgcaatgtatcggattgtaccatttcattgggaaacgtttccattacagatagtaaattagatgtaaataatgtttgtgattccaaacgagtagctaccgagaatatagctgtccgctatctgaatcaggaaattagataccctattatagatatcaaatggcttccgattggattactagcgttagctattttaatattagcatttttctaaacgagatataagataatattattgattattataatgttcttatctcatctctactaattgattaatcagcgactgaaataacagatctatcggctatctctactccagttaccatgttattgcggaaaaatctaacaatttttaatggtatattagggcgatagagaatcttgacaactatttccgtctctaacattttgggaagacgaagagtctttttaccatcacctgtttgtagtacactattaactatattagtttctgtagtatctagtctaacaaagctaggaaataagtcagatattaccacatctatgtatagaaaatttacaggaaacttgttatgacctttttgaagatacgatgttataatgattggttctccataatcatcatcaaccggagtataatttatggatgattcgttaaatacctgaaacacagttttcatagaatcaattttatgtctaacggttattaaagtaactaaatcattatactctatatcggtagtatatctcagtagtacgtttctatttattactgcgtacggatctcttgctatttctgtttttagacataaaatctttgctagatactttacgttgtattggttcatgactaactttttcagttgatgttgttggaatatttaagaaacgaaatatagattgttgtagaaatagtacctttgctttagtagtaggaaatgttttattgcagtacacggtcctcagcataaagtacatgtgaaaatagtcatattcctgattaggataatcaaagttaacaactactttgttacggacgatcttattaaggtagtacatctttttttcataatttacagcgtctaatttggtaactcgagtcagtctcatgttctcaccggtataaatacttaataatctcatttcagctgaatatgaaggagcaaaaggttgtaacattttattaccgtgtgggatataaaagtccttgatccattgatctggaaacgggcatctccatttaagactagatgccacggggtttaaaatactaatcatgacattttgtagagcgtaattacttagtaaatccgccgtactaggttcatttcctcctcgtttggatctcacatcagaaattaaaataatcttagaaggatgcagttgttttttgatggatcgtagatattcctcatcaacgaaccgagtcactagagtcacatcacgcaatccatttaaaataggatcatgatggcggccgtcaattagcatccatttgatgatcactcctaaattatagaaatgatctctcaaataacgtatatgtgtaccgggagcagatcctatatacactacggtggcaccatctaatataccgtgtcgctgtaacttactaagaaaaaataattctcctagtaatagttttaactgtccttgatacggtagtttttttgcgacctcatttgcactttctggttcgtaatctaactcattatcaatttcctcaaaatacataaacggtttatctaacgacacaacatccatttttaagtattatattaaaatttaatcaatgtttatttttagttttttagataaaaaatataatattatgagtcgatgtaacactttctacacaccgattgatacatatcattacctcctattatctctatctcggtttcctcacccaatcgtttagaaaaggaagcctccttaaagcatttcatacacacagcagttagttttaccaccatttcagataatggaataagattcaaaatattattaaacggtttacgttgaaatgtcccatcgagtgcggctactataactatttttccttcgtttgccatacgctcacagaattcaacaatgtctggaaagaactgtccttcatcgatacctatcacggagaaatctgtaattgattccaagacatcacatagtttagttgcttccaatgcttcaaaattattcttatcatgcgtccatagtcccgttccgtatctattatcgttagaatattttatagtcacgcatttatattgagctatttgataacgtctaactcgtctaattaattctgtacttttacctgaaaacatggggccgattatcaactgaatatgtccgccgttcatgatgacaataaagaattaattattgttcactttattcgactttaatatatccatcacgttagaaaatgcgatatcgcgacgaggatctatgtatctaacaggatctattgcggtggtagctagagaggattcttttttgaatcgcatcaaactaatcacaaagtcgaacaaatatcctttattaagtttgacccttccatctgtaacaatagggaccttgttaaacagttttttaaaatcttgagagtctgtgaattttgtcaattgtctgtattcctctgaaagagattcataacaatgacccacggcttctaatttattttttgattggatcaataataataacagaaagtctagatattgagtgatttgcaatatatcagataatgaagattcatcatcttgactagccaaatacttaaaaaatgaatcatcatctgcgaagaacatcgttaagagatactggttgtgatccatttattgatcgcaaaagctttgcacaatctttatacactatcggtttactatttattgataacgcagatgtttgagttgtcatccatggtaatccatagatcattaatttatcgtcttcacacgctagattagcacgtcgtaatctatcaataggatcgggtatttttcgtttaggcatgaagaacatatttaattcagatctaaaaaatacatatattagaatgaatacaacgaatacttcaaataaaactattaatctgtgtttataaacacttaataaagaatgtttaaacgtgggctctataaacacaggattaaagtatacattaggaacattctccatttatagtaatcaatcctttgtcggaatatctgttagaggaatattctttttaacacattccaatagtcccagaaaatcatttaacctaatgggttcttgaagagggctagaactatacgattctagttccttattagtactaagtttctctagtttatttttattggtgaatccgtaaatggcattcaatctcatggatgtggaaggagaatacacattcaggacattaattcccgcatatttagatatcaaagccttgttgtctccgataggtgtatactcagtcgacgcggattccatattttctttataaatattaatctttttacgagtttcgaaaatacacaagataggtgatgatccttgacggaaaataaccatgttcttattctttctcctaccactttttttaggaatgacggcagtcatatccgtattattaatgataagaggcataacctcattgttaggatccaagaaatagttttcaatggcttcaatagttagtttatcatcgcctagacccaaattgtttcttatattatacattgtggtaaacattgctcctgtgatattttcgttatgaatcaactccaactcatattttgacatcgttctaggtactatattaaaaatagaaagcatagatcttggaaatttggattttgcgccggcaataaccatttgtaaatcatcatactcagatatacttcctgcaaaaaatatggtatcttcttcgataaggttttctagcagtagactcatttagagaagttttttttgtgataaatgaatacccgtaccgatgttacaaacgataatatagacaaaaatccaaccaaacgaggtgatagaaatataccaggaagaaatgaaagatttaatgaccaaaatagattcaacaacgatataccaaagcctaaaccaagactacagcctaatcagccaccgaaacaagataataaatgcagagaagagaatggagattttatcaatattagattgtgtgcctacgagaaggaatattgcaatgacggatatctatctcctgcctattatatgttaaaacaggtggatgatgaagaaatgagttgctggtcagaactatcgtcgttggtgagatccagaaaggcggtgggatttcctctattaaaggcggctaaacgtatttctcatggatcgatgctatattttgaacagttcaaaaacagtaaagttgtgaaattaaccccgcaagttaaatgtttaaatgatactgttatttttcaaactgtagttattttatattccatgtataaacgtggcatatattctaacgaattttgttttaatctggtttctattcccagaacgaacattgttttttctgttaatcaattaatgtttaacatttgtacagacatattggtagttctatctatttgcggcaaccggctctatagaacaaatctaccacagtcgtgttacttaaatttcatacacggccatgagacaatagcccgtagaggatatgaacactccaattactttttcgagtggttgataaaaaatcacatatcgctattgaccaagcaaacgatggatattctcaaggtaaagaaaaagtatgctacaggagcaccagtaaataggttgttagaacctggtacactggtatatgtgcccaaagaagattattactttataggcatatcactcaccgatgtgtcaattagcgataatgtcagagtattattttccacagatggaatagtgttagaaatagaagactttaatatcaagcatttatttatggcaggtgagatgtttgttagaagtcagtctagtactattatagtataaagtaataaaaaatagttaatgtgatgactagcaccaccaacaacatttgataatttctacttactagacgtaccgtaaaaatataaattactataacaaataatagtatatcaataaacaacctaattaatggtcgaagtatagcaggacattgatgctctagaccgtgtataacaaaatctacaaatttttcatccgctatattttgtttcactatatcgtctagacgatcagcgataacttccatgttaatctattaaaatattatcaatatattttcagttttgcatatccgtggtagcaataaccatcggagaagttctaaagaatgtgtccatgtaagtagtccaatggacgttttccttattggctaaaataagtttgattttatcattggtggatgtgaacaacatacgcttggcatagtacataaacaacgctgccaatattataacaccgataacaatcatataaaactgaactcctgtaccagcaacttgtctaggtgctatttgagtagtggccttagtcgtcaattgcatcaacgctttaatggcacaatttcctttgctagatcctgtattaataaattccaaatttgttggagatcctggggctccgtaacattcatctatgattacgttttgtatctttaatttgttatcgacgaccgcgctagaattacaagtctgtttcacataattttcaaaatctctaacaacagtgtttacactcgtctgaatgtttaacgcagcagtaaacatagctggcacgtatgctttttgttccggtgttaatccactatatgtttctgtagcggctgataacacagcatccaactgagcatccgcgtccgcagagcacatatttttaacagtgaggttacatccatggttttgtcggatataaaaatttccgatttctatatcacattttgtttgagcactagcgttcgcttcttgttctaatttagacgagatacgttcgctgagtgtattcaccgtcgtctgtatgcttgccgcggcacccatttaaatagctacaattagtatccatattaccaagagagataataaactgatcaaatgcaattttaggtcgaacgagtgtttaatattatgttgaactacttttgctctattgacgggaacagtagaaaatctatcactattgcttaatccacatgacaatcttaatgaggaagttttatccatctgtaagttgttcacgctggtattacatcgtacaatattgcaaagtcctaaattattataattacgtgttagcaagaaattaacattggcattcgaacactctggatcccaacattctcgaggttccgcatattttaatgactcttctaacttatctctagtgggataactacatctcatatatttctgtttaaagtccgcagactgttgtcttagaatataatcgatcatctctttgctatcttctgtattgtgtgcgcgtaaataatgcaaaaatgattcgcatattggtacactagcatctttactacataatgtttgcatcttattatacagatttattaacgattgttgaccctctacagttctattactcctattaaaggctgaaccgatccactgatggcatatgtttctatcgaacgtatccccctgacaccagtcgaataaatcaacatcgcattttccagtgtcgtgaacgtctggccaacacgattctaatactgcaccctcttcatacttatctgatatctttccatccttcttccaataatgagtacgattaaaagtgcgacagcaattgggtgcggttccattatacgattgtcttaacaatgccgaaagaccaccgggtcctgtgttgactaatctaaactctggatatcttttctttactttatcctctttatcttttgctagtggtcctatatgcacatattctaaaagcttagcgggagctatcacgtcatgcattttatccacgtttaataacatctcatcagtgggtactcccggaggcggatcccgtttagggagctcaacacttactccgccacccatatttatctcattgaaagtattaatctaaaaacgccataaagatgttgatcttaaaggattgaactctatccgaaaacaacattcctagaatgttatcgtcattatccattacgattctagtttcaaaaacattgactctctttttgaatcctcgtagtttgttgagagacgagatagctattttgaaagaaaacttttgtagttcttgagaacattcagtcatagaatattccctggaaaatgcatcagtattaccaggagtcttcataataatattgtcatctttaaacataatagccagatgctgatgctgactaatacacttgataaagcccaacaaccattctagatgaatgacggttctaccacaacatttttcttcatacttgtgaaaattaaacacataagatttcttttgatctatacttagacaaatagtagtatctgtcctaataggcatcagttccttgttacaatcgacacttactacatgataactagaaagttttactagattattttccagatcaggttctatatctatgatggcatcattgtgaaaactacacaaacacgattttaccttggacaccggaagattaaacacaatattttcggctccgcggtagaacactgatgcactgagaggtataatggcccaaatgtttacagatccgcccaaggcggcaaaaatatacattaactcatccgtcgagtctacatttatagacacttcttcactgaactctgaaaaatatgccacaatttggcgcagtttatcgatttttatacggatgctcattttaaatttttgtaaattatttaaagttaaatggctgcagaacagcgtcgttctacaatttttgacatagtttcaaaatgtatagtgcaatctgtattaagagatatatctattaattctgaatacatagagtccaaagctaaacaattgtgctattgtccggcatcgaaaaaggaatcagtgattaatggtatttacaattgttgcgagtcaaatatagaaataatggacaaagagcagctattaaaaatattggacaatcttcgatgtcattcggctcatgtatgtaacgccacagatttctggagactatataattcgttaaaacggtttactcatactaccgcattctttaatacatgcaagcccactattctagccacgctaaacactttgataaccctgattttatctaacaagttattgtatgcggcagaaatggtagagtatctagagaaccaactagattcatcaaataaatcaatgtctcaagaactagcagaattattggaaatgaaatatgctctcattaatttggtacaatataggattttgccaatgatcatcggtgagcctattatagtagctggattttctggtaaagaaccaatttctgattattctgcagaagtggaaaggctaatggaactaccagttaaaactgatatagtgaataccacatatgacttcttagcaagaaaaggtattgatactagcaacaatatagcagaatatatagccggcttgaaaatagaagagattgaaaaggtagaaaaatatttaccagaagttatatctacaattgccaatagtaatataataaaaaataaaaaatctatctttccggccaatatcaacgataaacagatcatggaatgctctagaatgttagacacgagtgagaaatactctaaaggatataaaactgatggagctgtgactagtccattgacgggaaataatacaattacaacatttataccaatttctgcgtccgatatgcaaaagtttaccattttagaatatctttacattatgagagtgatggcaaacaacgttaagaaaaagaacgagggaaaaaacaacggaggagtagttatgcatattaactcaccctttaaggtaatcaatttgccaaaatgttaaattattagaatcatatatctttatccatctattatcatctgtgaagttttggctcagaaaaatatctttgcccaatattcgtttagacgatgtatcaataccggcatttttataacattcagctaccaatttaaaacaatacattctattatgaccaaatccatacggaatacccaataaagttaatgacgtatcagctgctattttcataacttgaatattctctaacatgtatacttttgcactaagatatccttcaaaaaaactatccaatgggactattcgaactccttttctataggtagattcaactaccaagtgttccgataataacgtaccataataaatacccacatgtttttctatcgatggattcaaatgacttgttaatgacatggtataattaataaaaataatagaacctctaggcgcatatgtcttgataaaattaaccggatccatattagtttatatccaatagaggttgcactgttaagttacgttgaggttctatttgtgtagataattttaacctacaacattcgttctttacactgacgagtacatcctttaatgatttttttcgtataatcaatttatatcgttcgtgagaaatatctttaccgcatgtagagcacacgagttggaacaccatttttaatctagtaacctatatttattatattatcacttttagtattggttattaacagactatcgttaaagtaaaatgaactatttatactcagtagtaaattatccttatagatgccgaacactatagtgttacagttttcgttagaatatccaaaaatcgaggatatagattttataacatcgatatctgatttagtattttcgaaatctatataagatgataaagttttaacttctgaaacatcaatctccttgcgtggttctaatgcatacattaattggcagggtaacggcacgctttctaaataagatgatttaaattcattccatttttcatctaatgcggaaaatataaattcttgaacagtgcattgacaaggaggaacatacgagtagacatcgtctaaattagcgtaatcgtttataaacgtaacaatattacgcacgtctacggtagagttagtctttctataataatttttaattgccaaactagtgactatattatcgattgtaaaatcactaaacaattgtattttgtttaagttgttgggtgttatagatgccccatagagtccaggaaagaaatcacatccattcactaacgccgttaattttgctaaatagttatcctctgccgagggaacaaatttaaacagttgagttaagttttttatcatcttaggatgattatcagtagatgcaaatagcatagtatcctgatcggtacttattatcaacggccattctcctgtggtagagaaatgtgttttagcctcgagacacataacgaattctgcgtctcgttcatcacaataaaataatgtaacattctcattattgttgaaatgtgttagtatctcattcaatgatatttttatgttatcagaatcagataaatatatttgaaatgtaagtttatcgatttttaattgcatttttgcctttatttcttcttccataaatccggtaacattttgtatttcggatgtacacttttctaattctaacatttttctgtccttggttaatttagaatatttacgtctcttgtctctaacgtcttgtttaatttttatacttcctctatcgataaaaagggttacatgccctcccttttttacccatccgtttacgtattttatgaataccgtagttaactcttctaagtttctgacacaattggcgacggctatataaatactcattgtatccacaaatattccattgtatactttgtataaattatcatctaatatcgtcagtgatttattttccagcagtaacgattttaagtttttgatacccataaatgaagaacgtattgattattttcggtaaaccgtattgtagtatttgtgaaaatgtcagtgagtcagtagaagaattaaaatccgagtatgatatactccatgttgatatcttatcattttttttaaaggatggtgattcaagtatgctgggtgacgtaaagcgcggaaccctaataggaaactttgcagcgcatctatctaactacatcgtttccattttcaaatacaatccacagacaaaacaaatggcatttgtggacattaataaatccttggatttcaccaaaaccgataaatcgctggtgaatttggaaattctaaaatccgaaatagaaaaagctacctatggagtttggccacctgttaccgaataaaatatcttcctgagtattttgtttattgttccgcttcctttatcaaataaattttgaagtatttgataatttattggatcgactagttcatctatacattttttggaaacgagaacatctacctttttatttgttgttatatgcgacgttgtatacgccataaatgtaacttgagaaaatccacaaagaattaattttgaaccagttatggggacgcgctcattagaatatgtataaatctgaggagtgtattccttgaggagatattctatcaagtcatcatttgcttccctaatataaatattcctgtcctttataacaactatgccttttagattatctcctaatttataacacggccgtatacacttggaatacttgtacaatctaagatagactaaatctctcagagttgtatcatggaattccatacttaattcctccgataaatctacatgttcaaatactttataaatatatttatggtatttcctatctggaaagtaagttatcaagtcatcataagatatttcaaatcctctacataaggaagacactatctccaacgattcctcatcttctgtaagtaggaatttggacaagttgaacaaaattagatctctaaatggcatctttattatatcttattttatttttgttattcgtatgtatttcttattattttacatattatccgaccaataaacttcaggcagctgtaatggaaacagatagagaaaacgctattattagacagcgaaatgatgaaataccgactagaacattagatacagctatatttaccgatgcatcaaccgtcgcgagtgcgcaaatacacctatattataattccaatattggtaaaattataatgtcacttaatggtaaaaaacacacctttaatttatacgatgataacgacatacgaacattacttcctattttactccttagtaaatgattgtcttaccgaataaagttcgtattttcatcaacgatcggatgaaaaaggatatctacttgggaatttctaatttcggattcgagaatgatatagatgaaatcttgggaattgctcacttgttggaacatctacttatatcctttgattctactaattttttagcgaatgcttctacatctagaagttatatgagtttttggtgtaaatccattaattcagcaacggaatcggacgcaatcagaacattagtttcgtggttcttttctaacggaaaactcaaagataatttttccctttctagtatacgatttcacattaaagaattagaaaacgaatactattttagaaatgaagtattccattgtatggatatactaacgtttcttagcggaggcgatttatataacggtgggagaatagacatgatagataatcttaatatagttcgtgatatgctggtaaatagaatgcaaaggatatcgggatcgaatatcgtaatttttgttaagagattaggacctggaacattggatttcttcaaacagacatttgggtctttaccagcatgtccggagattattccttcatctattccagtaagtacaaacggtaaaatagttatgactccgtctccattttatacagttatggtaaagattaatccaacattagataatattttagggattctgtatttgtacgaaacttaccacttaatagactatgagactatcggcaaccagttatatttaacggtatcctttatcgatgaaactgaatacgagagctttcttcgtggcgaggctatattacaaattagtcaatgtcaacgtattaatatgaattatagcgacgattatatgatgaacatctatttaaattttccttggctatcgcatgatttatatgattacattacacgtattaatgacgatagcaagtcgatactaatatccttgacgaatgaaatatatgcatctataattaatagagatatcatagttatttacccaaactttagtaaggccatgtgtaacactagagatacccaacaacatccgatagtagttcttgacgcaaccaatgatggactgattaagaaaccttatagaagtatacccctaatgaagcgtctaacatctaatgaaatatttatacgatacggagacgcgtctctcatggacatgataactttatcattgtctaaacaagatatatcattaaaaagaaatgccgaaggaatacgtgtaaaacatagtttttcagctgatgatatacaggcaattatggaatctgattcgtttttaaagtatagtagatcaaaaccagctgcgatgtatcaatatatatttctatcattttttgctagtggtaattccatagatgacatattggcaaatagagattctaccttagaattttctaaaagaactaaaagtaaaattttgtttggtaggaataccaggtacgacgtcactgcaaaatctagttttgtatgtggtatagtacgaggtaaatcattggataaaacgtctctggttgaaatgatgtgggatctcaaaaagaaaggactaatatattctatggaatttaccaatctattgagcaagaataccttttatctgttcacatttactatctacactgatgaagtatacgattatctaaacactaataaacttttttctgcaaaatgtttagtcgtgtctacaaaaggagatgtggaaaatttttcatctctaaaaaaagatgtggtcattagagtttaatttttagttattatctacaggaacaaatatagtatctgaaatcatattcatatatcccgttagaggtctatgataatatatagtagcgtttgttccgttatagacaccgaataatattttacaaaagtgtatatacgtatcatcatctttatgtttaaaatttaaaatcttaattcgtaaatttagagataaaatggcttcttgtacaatactagttaattctcccgtcctctcaaaattatccaactcctcagcgagaataggacttagtacataaagtttagcatactctatcatcttcatataataattggataataatttattccatgtttctgtactaatatcgaacgagtctatatattcctttgtacgccatagaatatccaaatttgtagggattataaacaaatcttcggggagtgttagattaaacttattagcgtacaatatataattatgtagaaattctgaatctattcgctgtatagacttcatataagacagatcatagaaatagacgtatgtaccaggattaactcttcctactcttccttttcgttgatctctcatagatttagaaataaattgttgcgatcctccaaaaggagcggggacaaaaactctacccatatcataaatgtgtgtaacattgcgtatagtaacgctggattccaaataaggagtagaaataattatcgatacattaggtgatgaatacactttttctaatatttcgtctatatctaagaccttaccatgaataatatacatatcatacggtaatcttttttctaaatatgatttatattcgtgacactgtgcaacggatgccacaaagactataccggatgatccatcaggaggagtatacatctgtatagcagtaactaaatttctcttttcttcttctatgtatgccattctggaagatggatttatcttattatgaataaatacctcgctaattttaaacagtgtatttccaggaatatgtataaatgcgggattaggtaaaaatacttttagccgttctcggtcatcctctaatgtggcagtcattaaaaacatagaatctattttcgtatgatgctttctcgctactgctataataatatctcctatttgatcatgctcatgaacttcgtctataataagagtgccataactaaatagttttgttagagataacttatgggtagaaaatacaattccatatttttttggttgtttgtttattaattcttccggtatagatccgtaccgtaaagaaataggagatccatctagtaccttaaatcccaatgattttaaaatggtattgctatgcaatctaactaaagctatcctaggaagagatagaatgactggtctttcgtgaaagtcagtgattttatctagagtagagaatccaccaaataaataattaaaccaaagcaataacttgggtacctgtgacgtcttacccactccagttcctccagttaaaactacaggtctatgagaaatccacgctaaaaatatctctcgttgtgctttaggagttaatgaggccaatggaattttgctaaatggatacttattccctagtacacctatagtatctgttcgtttacctacggaattggaaaatatctgtaaactattaccagcttctaatagtcctcttaatatatactcatcgaacgaattgatttctgtatttgttatacattttagaaaactataacattcaaagcttattgtgtgttcactgtatatatattgcttcgcggttaggtttatgtgtgcgggttttcctagtgatggaggagatactttttttccacgtgcttctgtactaactttgtatattcctttatgttttacaacgtgtgcgttatgccatctatgttttataactggaaacacggccaatgagaaactatcacgttccgttttactcatattactgaattcatcttgtgaatatttgtaagagaatacattaacgcagtttggaaaaaagaagatatctggtaaattcttttccatgataaatggaaagatatacagatttagtaattagtaaaataccagaactaggatttaccaatttattatgtcatatatattcactagctggattatgtagcaatatagatgtatctaaatttttaacaaattgtaacggatatgtagtggagaaatatgataaatctacaaccgccggcaaagtgtcttgtattcctatcggtatgatgttggaactagtagagtcggggcacctgagcagacccaatagtagcgacgaactcgatcaaaagaaagagttaaccgacgagttaaagacgcgttaccattctatatatgatgtctttgagttacctactagtataccgttagcgtatttctttaaacctcgactacgggaaaaagtatctaaggcgatagacttctcacaaatggatttgaaaatcgatgatttatcacgtaaaggaatacatactggtgaaaatccaaaggtcgtcaagatgaaaatagagcctgagagaggagcctggatgagcaatcgaagtattaagaacttagtctctcagtttgcttatggatccgaagtggattatataggacaatttgacatgagattcttaaactccttagcgattcatgaaaaatttgacgcgtttatgaataaacatatcttatcgtatatacttaaagacaaaattaaaagttctacctctagatttgtaatgtttggattttgttatttgtctcattggaaatgtgtaatttatgataaaaaacaatgtttagtatccttttatgactccggaggcaatattccaactgaattccaccactataataatttttatttctattccttctccgatggttttaacacgaatcacagacattctgtattggataatacaaattgtgacatcgatgttttattcagatttttcgaatgtacatttggagcgaaaataggctgtattaatgtagaagttaatcagctgttggaatctgaatgtggaatgtttattagtttgtttatgatattgtgtactaggacaccacctaagagtttcaaatctctgaaaaaggtttatacattctttaaatttttagcggataagaaaatgacattatttaagagcattctatttaacctgcacgatctatcactggatataacggaaacggataacgcaggattaaaagaatataaacgtatggaaaagtggaccaaaaagtcaattaatgtgatatgtgataaattaactacaaaattaaatagaatagtaaacgacgatgaataactttgttaaacaagtagcttcaaagtctctaaaacctaccaaaaaattgtctccgtcagatgaggtgatatctttaaacgaatgcataatatcctttaacttggataacttttattattgcaacgatgtactgtttactaagcccattaatactccggaggatgttctcaaatcactcttgatcatggaatcattcgcgtacgagaagatgataatcaaaggattaataaaaatactaatatttagagcatatattaatgatatttattttactccattcggttggttgacgggcgtcgacgatgatcctgaaacacacgtggtgataaaaataattttcaattcatcactaatatctatcaagtctcaagttatagaatatttaaaaccatacaatgtcaataacctatcggtacttaccacagaaaaagaattaagtattaatacgttcaatgttccggattctatacctatgtcgataatttcgtttttcccattcgatacagattttatactagttattttgttttttggagtatataatgactcgtattgtggaataagctatataagtccgaaagagagactaccgtatatcatcgaaatattaaaaccgttggtgtcggaaattaacatgttatcggatgaaataggtagaacatcatccattagaatcttcaattccactagcgtcaaaaaatttcctactaatacattaacatccatttgtgaaattgtttattcgtttgacgaatcatcctttccgacgcccaagacgttcactcctctaaacgcgagtccatacattcctaaaaagatagtttcactattggatttaccatctaatgtggaaataaaagcgatatctagaggcggtgtggatttcatcactcatattaataataagcgtctaaacacaatcttggtaatagcaaaagataactttttaaaaaattctacattttctggaacttttatcaaagagaatattatttggaagggtatctatacttatagaataatcaagtctagctttccagttcctactattaagtcagttactaataagaaaaaaatatgtaagaaacattgtttcgtcaattctcagtatacaactaggactttgtcacatattctttgatctaatttttagatataaatggtggatgctataaccgttctaactgcgatcggcataactgtattaatgcttttgatggtaatttctggcgccgccatgatagtcaaggagttaaatcctaatgatatattcactatgcaatcattaaagtttaatcgagccgtaacgattttcaaatatataggactctttatctatataccaggaacgataattttgtacgctacatacgtcaaatccctattaatgaaaagttaaataatttttttattacaccaacaaaaatgtttgtcattaaacgaaatggatacaaggaaaatgtcatgtttgataaaatcacgtctcgtattagaaaattatgttatggcttaaacacggatcatatagatcctattaaaatagctatgaaggttattcaaggaatatataatggagtaacaacggtagaattggacactctggcagccgaaatagcagccacttgtactacacaacatccggattatgccattctagccgccagaatagccgtatcaaatctacacaaggaaacaaaaaaactatttagtgaagtgatggaggatttattcaactatgttaatcctaaaaatgggaaacattctccgattatttcaagtatcaccatggatatagttaacaaatataaggataaactcaactcggttattatttacgaacgagacttttcatacaactattttggttttaaaactttggaaaaatcctacttgttgaaaataaacaacaagatcgttgaaagacctcagcacatgttaatgcgtgtcgcagtaggaattcatcaatgggatatagactcagctattgagacgtacaatctactttctgaaaaatggtttacgcacgcttctcctaccttatttaatgcgggaactagtcgtcaccaaatgtctagctgttttctacttaacatgatcgatgatagcatagagggtatctatgacacgttaaaacgatgcgcattaatctctaaaatggcagggggaataggtctatcaattagtaatattcgtgccagtggaagctatatctccggtaccaatggtatatcaaacggtattattccaatgttgagagtttataataacaccgctagatacatagatcagggaggaaacaaacggcctggagttatggccatatacttggaaccgtggcattctgatattatggcgttcctcgatcttaaaaagaatacaggaaacgaggaacatagaaccagagatctatttatagctctttggattcctgatctctttatgaaacgagtgaaggatgacggagagtggtcgttgatgtgtccggatgaatgtcctggattggacaatgtttggggagacgagttcgaacgattgtatacactatacgaaagagaaaggagatacaaatctataataaaggctcgagtcgtctggaaagcgattatagaatctcagattgaaactggtactccattcattctttataaggatgcgtgtaacaaaaagagtaatcaacaaaatttaggaactatcaagtgtagtaatctttgcactgagataatacaatatgcggatgctaatgaggtagccgtttgtaatctggcatctgttgccttgaacatgtttgtaatagatgggcgatttgattttctcaaactgaaggatgtggtcaaagtaattgtcagaaatctcaataaaattatagatattaattattatcctattccagaagctgaaatctctaataagagacatagacctatcggtattggtgttcaaggattagcggacgcgtttattctcttaaattatccatttgatagcctggaagcacaagatctaaataagaagatcttcgaaaccatttattacggtgcattagaggcgagttgtgaactagctgagaaggaaggaccatacgatacatatgtaggatcgtacgccagtaacggtattctacaatatgatctttggaatgttgtaccgtcggatctttggaattgggaacctctaaaagataaaatcagaacatacggtcttagaaatagtttattggtggcacctatgccgactgcatcaactgctcaaattttgggaaataatgagtcggtggaaccgtataccagtaatatttacactcggagagtattgtctggagaatttcaagtagttaatccgcatctccttagagttttaaccgagagaaaattatggaatgatgagatcaagaataggattatggcagatggtggatccattcagaatacaaaccttccagaagatattaagcgagtttataaaactatttgggaaattccacaaaagacgatcataaaaatggctgcagacaggggagccttcatcgatcaaagtcaatctatgaatatccatatagcagatccgagttattccaaactaacgagtatgcatttttacggatggagtctcggtctaaaaacgggaatgtactatctacgtacgaaacccgcatccgctcccattcaattcacattggacaaggataaaataaaaccactggtggtttgcgattccgaaatctgtacatcatgcagtggttaaacaaaaacatttttattctcaaatgagataaagtgaaaatatatatcattatattacaaagtacaattatttaggtttaatcatgagtaaggtaatcaagaagagagttgaaacttcaccaagacctactgcatctagcgattctctacagacttgtgcgggtgttatagagtatgcaaaatcgattagtaaatctaatgcaaaatgtatcgaatacgttacactaaatgcttctcaatacgctaattgttcgtctatctctataaaacttactgatagtttatctagtcaaatgacttccacttttattatgttggaaggagagactaaactttataaaaataaatctaaacaagatagaagcgatggatactttctaaaaataaaagttaccgcggctagtcctatgttgtatcaacttctagaagccgtctatggaaacattaagcacaaggaacgcattccaaattctttgcatagtctttcggtggaaactattacagagaaaacatttaaggatgaatccatcttcatcaacaaattaaacggatccatggtagaatatgtttcgactggagaatcatccattctcagatctatagaaggtgaactagaatcactcagtaaaagagaaagacaattggccaaggcaattatcacacctgtagttttctatagatccggaacggaaacaaaaattacattcgcactcaagaaactaatcattgatagagaagtggtggctaacgttatcggactctctggagatagtgaacgtgtatcaatgactgaaaatgtagaagaagatctggctcgtaatctgggacttgttgatattgatgatgaatatgatgaagatagcgataaagaaaagccaatattcaatgtataaatggataagttgtacgccgctatatttggtgtatttatggggtctccggaagatgatttgacagactttatagaaattgttaaatctgttctaagtgatgagaaaacagtcacatcaactaataataccggttgttggggttggtattggttaattattattttttttatagttcttattctactactattgatatatttgtatttaaaagttgtttggtgaacttaaatggcggaatttgaagatcaactcgttttcaatagtatcagtgcccgtgcattgaaagcttatttcactgctaaaatcaatgaaatggtagatgagttggtcacaagaaaatgtccacaaaagaaaaaatcacaagctaagaaacctgaagtacgcattcctgtagatcttgtaaagtctagttttgtgaaaaagtttggattgtgcaattatggaggaatccttatcagtcttattaatagtctagtagaaaataatttctttacaaaggatggaaaactggatgatacaggcaaaaaggaattggttttgacagatgtcgaaaaacgaattcttaataccatagataaatcatctcctttgtatatcgatattagtgatgttaaagtattggctgctagactaaaaagaagcgctacacaatttaactttaatggacatacatatcatctggaaaatgataaaatagaagatctcattaatcagttggttaaggacgaatccattcaactggatgaaaagagttctattaaagatagtatgtatgtcattcccgatgaacttatcgatgttctcaaaactagattgtttagatctcctcaagtcaaggataatattatttcgcgtactagattgtatgattattttactagagttactaagagagacgaatcgtcaatctatgtgattctaaaggatcctaggatcgctagcattttgtcactagaaactgttaaaatgggcgcctttatgtatacaaaacatagtatgttgacgaacgctatttcatctagagtcgatagatattctaaaaagtttcaagaatctttttacgaagatattgcagaatttgttaaagaaaatgagagagttaatgtatcgagagtggttgaatgtttgactgtgcctaatattactatatcaagtaatgctgaataaaaatatttataaatatgctcgtcgtaattatgttttttatagcgtttgccttctgtagttggctatcatatagctatctgcgtccatatatctcgactaaagagttaaataagtcgagatagttttatatcacttaaatattaaaatggccgaggaatttgtacaacaaaggttggccaataacaaagtgacaatttttgtcaagtatacatgtcctttttgtagaaatgcactggatattctaaataagtttagtttcaaaagaggagcgtatgaaattgtcgatattaaagaatttaaacccgaaaatgaattgcgggattattttgaacaaattactggtggtagaactgttcctagaatcttttttgggaaaacttctattggtggatatagcgacctgttggaaatagacaacatggacgcattgggtgatattctatcatctattggggtattgagaacttgttgagaaaataatgaaaaaacaatacttaatcatgtcgccgacatgttcatgtatccggaatttgcgaggaaggctttatcaaagcttatttcaaaaaaattaaacattgaaaaggtgtctagcaagcaccagctcgtgttactggattatggattacacggactattgccaaaatcactgtatctggaagctattaattccgatattctcaatgttagattctttcctcctgaaataataaacgtcactgatatcgttaaggctctccaaaattcttgtagagtagatgagtacctaaaatctgtttccttatatcataagaattctttaatggtatcgggaccaaatgtagtcaagcttatgatagaatataatcttcttacacacagtgacttggaatggttaattaatgagaatgtagtcaaggctacataccttttaaaaatcaatgcctatatgattaactttaaaatagatctaacggttgatgaaatcattgacttagttaaagatattcctgtaggagctacgctacatctatataatatattaaacaatatagatttggacattgttcttcgtatatctgatgaatataatataccacctgttcacgatattctgtctaaacttaccgatgaagagatgtgtataaaactagttacaaagtatcctatggacaatgttataaattttattaatcaagatgttagatatagtcccaccttcatcaagacaattaaagattttgtcaacaagcatcttccaaccatgtacgatggattaaatgattatctacattctgttattatcgacgaggacttaatagaggaatataaaattaaatccgttgccatgtttaatttggaatacaaaactgatgtagatactctaacattggacgaacagatatttgtagaggtaaacatctcatattatgattttagatatagacaatttgccgatgaatttagagattacattatgataaaagaaagaagacaaatcaccatgcaatctggtgatagaataagaaggtttagacgtcccatgtcattgagatccactatcatcaaaaaggatactgattctctagaggatattctcgcacatatagataatgccagaaaaaatagcaaggtatccattgaagatgttgagagaatcatttcatctttccgtcttaatccctgtgttgtcagacgcaccatgctgtctgatatagatatcaaaacaaagataatggtgctaaaaattgtcaaagattggaaatcttgtgctctgacactatcagccatcaaaggaattatggtaacagataccatcaataccgtgttatccaaaattctgcatcatcataggaatgtcttcaagtatcttacatctgtagagaataaagaaattgctgtctgtaattgctccagatgtctgtcgctcttctatagagaattaaaaagtgtacgatgtgatctacgcacagatgatggattattggataggctatacgatctgactagatacgccttacacggaaaaatcaatcaaaacttaatcggtcaacgatgttggggtccgttgacagaaatgctgtttaacgagaataaaaagaaaaaactaaataatttaatggaatacatcaaaatatcagacatgttggtatacggacactccatcgagaagacgcttattccaattactgattctctttcattcaagctatctgttgataccatgtctgtgttaaatgatcaatatgccaagattgtcatcttcttcaataccatcatagaatatattatagctactatctattatagattgacagtcttggacaattatactaatgtcaaacattttgtatccaaagtgttacacactgtcatggaagcatgtggcgtactgttttcatacattaaagttaatgacaaaatagagcatgaattggaggagatggtggacaaaggtaccgtaccttcttatttgtatcatctgtccatcaacgtcatttcaataatattggatgatataaatggaactcgttaatatttttttagaaacggatgctggaagagtaaagtttgccataaaaaataccgacgatgtatgtgcctcggagttaataaataaatttgtggaactgttaagtgaatacattcacattgaccaatcagaattttatttggtggtaaaggataaggatattttttattttaagtgtgatagggggtctatttcgattgtaaacaatgagttttatgtctttgacgaacccttgctgtttgttaaagatttcactaatgtaacgggggttgaattcatagtcacagaaaccatgccgtgtagaattataccaaaaaataatcacgcggttatttcagtcgtgactaatcataagttttataatgggttaagtttataaagggttaacctttgacacattgattgcgtatttgggatcagatgccaaattgttaaataatctgatgaaaaaataataaatataattcagatcatcgctagacatgacattattgtcctctatagcgatagtcgcgtgccgtctacatgcaggacatggaagagtgctgactatagtatatagttttcgtttacacgcttctatgttgccgtctaaacccgcttgcgaaagtactataaaaataatggtccatacggctcttccccaatgtttgggattcatttaaatgaaaatatatttctaaattctataaatggatgttcggtgcattaattggtttgaaagtcacggtgaaaacagatttttatatctgaaatccagatgtcgaaatggtgagaccgtatttatacgatttcctcattacttttattacgtagttacggacgaaatatatcagtcattgtctcctcctccatttaatgcgaggccgttgggaaagatgagaactatagacattgacgagacaataagttataatctagatattaaagatagaaaatgctccgtcgcagatatgtggttgatagaagagccaaagaaacgcagcatacaaaatgccaccatggatgaatttctcaatattagttggttttatatttctaacgggatatctccagacggatgttactcgttggacgagcaatatttgacaaagattaacaatggatgttatcattgtgacgatccacgtaactgtttcgctaaaaaaatacctagattcgatatcccaagatcgtacttatttctagatatagagtgtcacttcgataagaagtttccttctgtatttattaacccaatctcgcatacaagttactgttatatcgatttaagtggtaaacgattattgtttacgctcattaatgaagagatgttaacggaacaggaaatacaagaagccgtcgatagaggatgtttgaggatacagtcactaatggaaatggattacgaacgagaactagttctatgttctgaaatagttttgttacgaatagctaaacaattgttggaactaacgttcgactacgtcgttacctttaacggacataactttgatctgagatatattactaatcgtctagagttattaacaggagagaagattatctttagatctccggacaaaaaggaagctgtacatctctgtatttatgagagaaatcagtctagtcataagggagtaggcggcatggccaatactacgtttcacgttaataacaataatggaactatatttttcgatctatattcattcattcaaaaatctgaaaaattggattcgtacaaattggattctatatccaagaacgcgttcagttgcatgggtaaagtattaaatagaggagttagagaaatgacgttcatcggtgacgatactacagacgcgaaaggcaaagccgctgcatttgcaaaggttttaaccacaggtaattatgtgactgttgatgaggatattatatgtaaagtaattcgtaaagatatttgggaaaatggatttaaagtcgtactatcatgtcctactttacctaatgatacatataaattatctttcggaaaggatgacgttgatttagctcagatgtataaggattataatctaaacatagctttagatatggctagatactgtattcatgatgcttgtttgtgtcagtatttgtgggagtattatggagtagaaacaaaaacagacgcgggtgcgtcaacatatgtgcttcctcaatccatggtattcgaatatagagcgagtacagtcatcaagggtccactgttaaagctattgttggaaactaaaactatcttagttagatcagaaacaaaacaaaagtttccttatgaaggcggtaaggtatttgctccaaaacaaaaaatgtttagtaataatgtattaatctttgattataacagtctgtatcctaatgtgtgtatctttggaaatctatctccggaaacattagtcggtgtcgttgttagtaccaatagattggaagaagaaataaataatcagctattgcttcagaaatatccacctcctagatatattacggttcattgtgaacctagactaccgaacctcatctctgaaatagcaattttcgatagatcgatagaaggaaccattcctagactattaagaacatttttggcagagagagccagatataaaaagatgttaaaacaggctaccagttcaactgaaaaggccatctatgattccatgcaatatacgtacaagatagtagccaactcagtatatggtctgatgggatttagaaatagtgctctatactcatacgcttcggctaagagttgcacatccataggacgtagaatgatcttgtatctagaatcggtactaaatggagcagagttatctaacggtatgttacggtttgccaatccattaagtaatccattttatatggacgatagagatattaatccgattgtgaaaacatcgttgcctatagattacagatttcgttttcgtagcgtgtatggagataccgactccgtgtttacagagatagacagtcaagatgtcgataagtctatagaaatagcgaaagagttagaacgactgattaataatagagtattgtttaataattttaaaatagagtttgaggcggtatataagaatctgattatgcaatcgaagaagaaatatacaacgatgaaatactcagcatcgtcgaattcaaaatctgtacctgagagaattaataaaggtactagtgaaactagaagagatgtttccaagtttcataagaatatgattaagatgtacaaaaccagactgtctgagatgttgtctgaaagacggatgaattctaatcaggtatgtatagatattctccgttctttagaaacagatttacgatccgaatttgatagtagatcgtctcctctagaattatttatgttgagtcgaatgcatcactcaaattataaatccgcagataaccctaatatgtatttggttactgaatataataaaaataatccagagactatagaacttggagaacgatattattttgcatatatttgtccggctaatgtaccatggaccaaaaaacttgtaaatattaaaacatatgagacaattatcgatagaagttttaaactcggcagtgatcaaagaatattttacgaagtttactttaaacgattgacgtccgaaatagtcaatctattggataataaagttttatgtatctcattctttgaaagaatgtttggttcaaaacctacattttacgaagcataaaataatttacaacagttgtacgtcgctctttgttagattcagtttatccattagatattctacggctggagtaatttttgtagtaattgaatacccaggtacgtaaaacaataaaaacattaataccggatcatacttggtaaagtacaatatagtactaatattagctaatgtctcataatcggatggacttcttgctctactaagattagggtgatctatatctttgatacctattggaacgggaccggtaaatatataattctctttgagacgactaaacaaaggcttatagtctcctgtttgatgcatatacctagccaacgccaggtgtttggcattatctgtatagacgtatctgaataatgtgtgtttagtaatatcaaactgagtatttttaaaccagaacaagatattatagattggaatggaagtcagtaacaaaaaactaataaactcgtttgttggaagagcagaaaactttcgaagatatgatacgtatctaccagagaacgatccattggctatgaattcagtatttactttttcttcatatacgggaataggacctttatatagagacatgagaaactcaaactttttaagtaatcccaacgaaatgggataatagtcactagcatctaggtttgcgtatctactactccaaattgcagtttctggtatccatccatacgcgtaattatcaaatagatatgtgtttttcattaacggtctacttagacctctactaaaaaatgtttcttgatctagaattcttctttgtgcatttttgtacacgtcgtcaaaacgcggaacggtggcagccataatatttatatcctaccgctttttatcaactatgtaatgagtttttatgttatgtcttttagttaggttaatattctaataagatgctaatacatcaggttaaagtattagaatgggattatacttatatatttagtttatctttcatcagataactaaaaaatgtataaaacagacgcgttacattgcctatgctacatgagttccatgtgcggagattgttaaagtttagggtagagagttgttctagcatccattcattgtctttacatccgttatatgtaattatgtcacccatggacattataggttttaatagtacttcagatactggaataagatattgttcgtatatgtgtttgataatcatttgttgcgtttctggagaacttttctccgcatgatttttacatagctttacaaactcgtgatcactttttataatgagagatctatagtcttcgtatctgttacgaaaatcaatatattcaggattattttctgaatcacttgattcgtcactaatatacataactatatgatcaacaattttttccaaaatcatttctgcattttctttattcattaatttggtgggagtctgaattgttgcagcagttcccatttatcaaaaatgtgtgaatttttaatatgtgataattatatctatgtatatacaaattattaataatatatttggtctgttctatgatctaccgtgtcttatcaattgaagtatatatttcttatccgtcttggttagatggatgcttttatccaagaattcttctacatgatatagattatctctcaaaaacctttgaaataagacgatgatggaaatattataactagctaaaatagttttgattagcgatggaagaatactagggtttttatctgtagaaaatcgaacgaatgcggatacatcctccacagacttaagatggtttatcattttaactaacaagtctcctttataatcatctaacacaagacctagacgagccaattgtccgtctaaataatattttaaaatgtttttgctaaacaagttcagccgtctactcttggattttatagatgacagtttctttagtattccgttctctatgaccatgggatccgactcgtgcaaaaacaggtatgtattgtattccttaacataatacgacgtatcctcgttaaagatttgacacttcttcatatcatccattgtatctaatgtgatatcgttcacctcataaattatattagatatataactgttattaatatctaactcatcaaatcgtttaatgtccgcagcactcgtagagaataaagacataattcgttcattatcgaaatattcgggatctatttgaacaacaactctgaataagtcctcgttaaacgttttatcactaataaatgtattaccgttaataaaattagctttataaaaactaataaaatattttttccaatcgtcgttttttgcatcaataatagataggatatctccaggaatatcatatatgatttctagcagaagttctctgatatctttttcaggctcaaagatataaactaacttaagcatgtttttattaacgcgtccttgttttatctcagagtatatataactaagaattttatcatacatggtaatggcgtgtctattaagaacaatatccgcatcattagctatactttcgtttaaccacacccaatagctagtcttatctccgggaaagatataatctctaaacgtttctgttagattgctatggactattctaccagtttgttgaaatagagtgtatatatcttgtctatcattatccgcaaactctatgcctgtatctttcttgcttaggtaagcccaaataagtaatcttataacacttaattttttaacaactttgaagtctgttttcttaaacagttttaaaaaaatgatttccatatctttgatgggttcccctccgtgaaataatggattaagaactaagtcataatttacgcctataagttctcctaattcgtccatgtattcggcaacctctaaaaatttttcatcttgtgttagtttatgcacggtttccttgtacgattgtattgcgttactaaacgataaataattcttagtcaatgctttaacgtacaacgtgggtgcatcaaatgcgtgtcgtaaaaccgcttcgtacactttacaacatcgtaccatatgtatgaaaacaaaaaaattggtattagctaatacatccttagtaataacgtgttgaggaaaattgctaactagatacttgagagctagtacatgattgagggtaaaattgtttactttacttaatgtatcatcctttaaaaaatctatattattttctactgtgtatataagatactttctacgaataaaatccatttttatagaagagagttatctatgatactacactcttattctaataattatttttactattttatcactaataactatttatactatccattattaatttaacaatttgaattagtattggagaaagatgaaatgcctattcactaacaaagtcaatgcactcttgaagatttttaccaataatatgtagcggattctcaaagtatttatttaccatttctttacacagtatcttagccactggcctacgaacaggcatacatggttcaactatatcatgaacaatgtttaattttagtgtatccaatccaataaatccattttctacatcatcatcgtatctgtatgctttgtattctccactcttgaacaaatctctaaacagtatcttcaacactttttccaccaattcctgggatgtcacacattgttctaccatctgtttgatgaagagggtatcttcttcagattctcccttgattctatacatgggttttaggttataccttgcatctattgtatatttatcagattcagctatcaacattttatcaacttgtgttccatttattagatctgcattcattattatagaatctttcttccactaatattctaataagattaagtttgaaaggagagaagatcttgtgtttgattttactcattggatgcattctataacgaatgaatctatgatcatctccaaacaaattgggaaacatgtaaagcagcagagcatataccatcttactcggattctgtgatgctttgccgatggctgaaatgtccgagaatagtttataagttttctgattatttggaatagatggtgctatatcttctagagtagtagtcctaatcattctcttaaattttatgtatcctagtttcaatgtctcgtaatgagtttgtgctgctcttattgtctgatttatttcttttaccattttggctctattctgaaactttgtcctcttcttatccattttcattgttgactccgcactatcgatttgatactttcttttcagagtaaagctatcgtcattgatcatcggacactgacttccactcattatgaaattgtagccgtataaccacaatacaattattaacatatatattcacttttgttaatatcaacataataatgaaaaaatataaatgaacaaagttaatacataagtgttataaatggaaaatgtatacattagtagttactcatccaatgaacaaacatcaatggcggtagccgctactgatatccgagaattactatcacaatatgtggatgatgccaacttggaagacttaatagaatgggccatggaaaaatcatcaaagtactacatcaagaatataggtaatacaaaatctaatatcgaagaaactaaattcgaatcaaagaataatattggtatagaatactcaaaggattccagaaacaaactatcgtatagaaataaaccgtctattgccacaaatttggaatataaaacactatgtgatatgattaagggtactagcggcaccgaaaaagaattccttcgctatctcttattcggtataaaatgcattaagaaaggagtagaatacaatatagataaaataaaggatgtgagttacaacgattattttaacgttctcgacgagaaatacaatacaccgtgtcctaactgtaaaagtaggaatactacgccgatgatgattcaaactagagccgctgacgaacctccactagttagacacgcgtgtagagattgcaaacaacactttaagcctcccaaatttagagcatttcgcaatcttaatgttacaacgcaatcgatacatgaaaacaaggaaataacagagattcttccagataataatccatctcctccagaatctccagaaccagcatcacctatagatgacgggttaatcagatccacattcgataggaacgacgaaccaccagaggatgatgaataaaaaaatgataaagtaggttcagttttattgctggttgtgttagttctctctaaaaatgtctaagatctatattgacgagcgttctgacgcagagattgtgtgtgcggctattaaaaacattggaatcgaaggagctactgctgcacaactaactagacaacttaatatggagaagcgagaagttaataaagctctgtacgatcttcaacgtagtgctatggtgtacagctccgacgatattcctcctcgttggtttatgacaacggaggcggataagccggatgctgatgttatggctgacgccataatagatgatgtatcccgcgaaaaatcaatgagagaggatcataagtcttttgatgatgttattccggctaaaaaaattattgattggaaagatgctaaccctgtcaccattattaatgagtactgccaaataactaagagagattggtcttttcgtattgaatcagttgggcctagtaactctcctacattttatgcctgtgtagatatcgacggaagagtattcgataaggccgatggaaaatctaaacgagatgctaaaaataatgcagctaaattggctgtagataaacttcttgggtacgtcatcattagattctgattctaattatacatcggatccataaatattaattttttttgagatatattaaaaaaaatacaaattttagtactattaacgcaactagtattctctaaagatgatatctgtgacagatattcgtagagcgtttctagataatgaatgtcatactatcacaaaagcgtttggatatttgcacgaggacaatgcgatagcattaattaaaataggatttcatcccacttatctacccaaagtcctttataataatgttgtagaatttgttccagaaaaactatatctgtttaagccaagaactgtagctccattggatttgatatctactataacaaaattaaagaacgtggacaaatttgcctcacacataaattatcacaagaatagtatattgataacaggagacaagtctctaattgttaaatgtatgccttacatgattatttcagatgatgatatacgattcataagagaacagtttgttggtacaaattctattgagtatattctatccttcatcaacaaggaaagcatatatagaatgagttaccaattttcagagaatgaaatagtcactatcatcaatagagatcatttcatgtatgaaccaatatatgaacatcaggtcttagattctgactttcttaaaactatgttagatagatacggaatagttcccattaattctggtataatagatgaattatgtccagaagctataatagagatattaatggcagtagttcgtcctagggacgctatccgtttcttagatatagtgaataagaatcaattgacagaagatagtgtcaaaaactatatcattaatgatatcagaagaggtaaaatagattattatattccatacgttgaagattttttagaagatagaactgaagacttgggaatatatgcgaatatattttttgaggatgctatagatattacgaaactagacatcacaaagacagagttggaacatatatcaaaatacatgaattattacactacttatatagatcacatagttaacatcatcttacaaaataattatatagatatcttggcatctataatagattacgtgcaagacgtattaacagaagaattatgtattagaatagtttgcgaatcaacaaaccctgttcccgttacatctcttcctatacattctacgttagtaatggttatgtgtatacaaatgaaatatgtcgatatagttgaattcttagacgagatcgacatcgatactttaatagaaaaaggagcagatccgataaccgaatacacatttacaacaagatggtacaataaacacaatgatttgatcactctttacattaaaaaatatggattctgtccaatgatgatgaaacggttaatgttcgaatatccattgactaaagaagccagtgatcatttacttaaaaccatggatgaaaacaggggagctattatgttttttccgcgtactatttgcacacttccttatctattatgttgtaattataaactaattcaaaaacctattccattcaaagaagaaaatcgtaacatcgtatataagaaaaacaacagagtattatgctttgactcgttggagaactctgcgtttaaaagcctcattaaaatagattctattccaggattaaaaacttataacatgaaagacattacatacgaaaagtctaataatataatttgtgttaggtttatacctcaagaatcaattcataatgaagagcgaagaataaaattacagttattcgacattgctagattggcatcctatggactatattatattccctctagatatttatcatcgtggacaccagtagtgaacatgatagagggaagagagtacactaatccacaaaaaatagaatgtctagttattttggatttattttcagaggaattcatagaatatcaaaatctgggcaatgcggtatctaataaatatgaactggaatatactatatctaattatcaagctgccataaactgcctaatgagcacgttattaatatatctagttctaggatcaatcagatcgatatcaaaaactgaagattttgtattatctatattaaatatcttctataaaggactgaaaattaatgaattactttctgaaccagtatcaggagtttgtatcgaattagataaaataaaagatagagcgagctctggagacagtagttttatatttcttaagaaaaacgagttatcaaaaactctatcgctctgtgaaaaagtttgcgtagagaccatattagacaataatcagagttttaaatcctcaaaatgaataggaatcctgatcagaatacttttcctaatattacattaaagattatagaaacctatttaggcagagtacctagtgtgaacgaatatcatatgttaaaattacaagctagaaatattcagaaaataactgtttttaacaaagacatatttgtatctttagtaaaaaagaataaaaaaagatttttttccgatgttaatacatctgcatcagaaataaaagatcgtatacttagctacttttctaaacagactcaaacatataatataggtaaattatttacgattatagaactacaatctgtattagtgaccacatacacggacatattaggagttcttactattaaagctccaaatgtaatttcatctaaaatttcttataatgtaacatcaatggaagaattggcaagagatatgctaaattctatgaacgtcgcagtaatagacaaggcaaaagtaatgggacgtcataatgtatcttccctagtcaaaaatgttaataagttgatggaagaatatcttagacgccataataaaagttgtatatgttacggatcatattctctatatctaattaatccaaatatactatacggcgatatagatattcttcagactaattctaggacttttcttatagatttggcctttctaataaaatttatcacgggaaataatattatattaagtaaaatcccatatcttagaaactatatggtgataaaagatgaaaacgataatcatatcattgatagttttaatattcgccaggataccatgaacgtagttcctaaaatctttatagataatatctatatagtggatccgacgtttcaactattgaacatgataaaaatgttttctcaaatagatagattggaagatctatccaaagatcctgaaaagtttaatgcgcgtatggcaaccatgctagaatacgttagatatacacatggtatagtctttgatggtaagcgtaataatatgccgatgaaatgtatcatcgatgaaaataatcgcatagttactgtcactactaaagactattttagctttaaaaaatgtctagtgtatctagatgaaaatgtgttatcgagtgatatattagatcttaacgccgacacatcgtgtgatttcgagagtgttacaaattctgtatatctaattcatgataatatcatgtatacatatttctcaaatactattctccttagtgataaggggaaggtacatgaaataagtgccagaggtttatgtgcacatatattgttgtatcagatgctgacatctggagaatacaaacaatgtttatcggatctcttaaattcgatgatgaatagagataaaatacctatctattcacatactgaaagagataaaaaacctggacgacacggatttattaatatcgaaaaggatataatagtattttaggacaaaagtctagaagctacattatcgcgattagccgcgaacatattttgtagcatgtccgtcctcataaacggaacttgttttcctgggttattcattctctcgcatctggaaggggacgaaggtcttctctcacacgcgggtgatgagggtttatctactttgagtacgcaggaagctttacttccttcacattctacagttctaacatcgcatactttaacggcttttagaaccaaatatcttccttctttggtattgatataaaacggagtatgagcagatgcaaaatgagaattcatttatagcatagaaaaaaacaaaatgaaattctactatatttttacatacatatattctaaatatgaaagtggtgattgtgactagcgtagcatcgcttctagacgcatctattcagtttcaaaaaacggcatgtaggcatcactgtaattacctatctatgcaagtagttaaagagatagaagaatttggtactatcaatgaaaaaaatttggaatttgacacttggaaagacgttatacaaaacgatgaaatagatgcattagtattttatagagtaaaacaaattagtatttctacgggtgttctatataaatctatgatgcgcaatagaacaaaacctatttccatgtactttgtacgtgattgtttggcatttgatggagatcctccgtcttttagaatgacgtcttgcaatatcaacgcatacaatcgtaataagattaaagatttgataatcctaatgaatatgaaaacatgcaataaaaaaattatcggtgagtttataatagacaattttggaagcgttgatgcattactatcgataattaattctaatgttacgtgggttacatcagttataaataatagtaacggcaggggtattaatatcagggtatcaaataataaaatgttaactataactagttttcgacgatttgtcaataaacttaaaatgtacaaaactactaaatgcgcttctcaattggataatctatgtaccgagatgaacaaaatggatattatagacaaaaaatgaaacgtaatgaggagtattgcggggctacataaattaaaaatggaaatttttaatgtagaagaattgataaatatgaaaccttttaagaatatgaataaaataacaattaatcaaaaggataattgtatattagcaaatcgatgctttgttaaaatagatactcctagatacataccatcgacatccattagcagttctaatatcatcagaatacggaatcatgattttacattatctgaattattgtattcaccgtttcattttcaacagcctcagtttcaatatctccttcctgggtttgtattaacgtgtattgataaagtttcgaaacagcaaaaaaaatgtaaatattgtatctctaatcgtggagatgatgatagtttaagcattaatctatttattccgactattaacaagtctatatatattattatcggtttacggatgaaaaatttttggaagcctaaattcgaaatagaataatgtttttatattatacatgttctaaaagaataatcgatacagtttaagtgaaagctagagaggggtttttaaatggtcatcggtttagtcatattcgtgtctgtggcggccgccatcgtcggtgtgttgtctaacgtattggacatgtttatgtacgtagaagaaaataatgaagaggatgctagaatcaaggaggagcaagaactactgttgctatattgatacataattgaaaatctaccaacttaaatacaccgcctataaatttacaatgaaacacagattgtattctgaaggattgagtattagtaatgatttaaactcgataatcggtcaacaatctacaatggatacggatatagaaataaacgaagatgacatcatggaacttcttaatatattgactgagttaggttgtgatgtcgactttgatgaaaattttagcgatatagccgatgatattctagaatcgttgatagaacaggatgtataagtttttatgttaactaaatgtggccatttgcatcggtacctgcgggagcaaaatgtaggctggtagaaacactaccagaaaatatggattttagatccgatcatttaacaacatttgaatgttttaacgaaattatcactctagctaagaaatatatatacatagcatctttttgttgtaatcctctgagtacgactaggggagcgcttatttttgataaactaaaagaggcatctgaaaaagggattaaaataatagttttgctagatgaacgagggaaaagaaatctgggagagctacaaagtcactgcccggatataaattttataaccgttaatatagataaaaaaaataatgtgggactactactcggttgtttttgggtgtcagatgatgaaagatgttatgtaggaaacgcgtcatttactggaggatctatacatacgattaaaacgttaggtgtatattctgattatcccccgctggccacagatcttcgtagaagatttgatacttttaaagcctttaatagcgcaaaaaattcatggttgaatttatgctctgcggcttgttgtctgccagttagcactgcgtatcatattaagaatcctataggtggagtgttctttactgattctccggaacacctattgggatattctagagatctagataccgatgtagttattgataaactcaggtcagctaagactagtatagatattgaacatttggccatagttcccactacacgtgtcgacggtaatagctactattggcccgacatttacaactccattatagaagcagccattaatagaggagttaagatcagacttctagttggtaattgggataagaacgacgtatattctatggcaaccgccagaagtctagacgcgttgtgtgttcaaaatgatctatctgtgaaggttttcactattcagaataatacaaaattgttgatagtcgacgacgaatatgttcatatcacttcggcaaatttcgacggaacccattaccaaaatcacggattcgtcagttttaatagtatagataaacagcttgtaagcgaggctaaaaaaatatttgagagagattgggtatctagccacagtaaatcgttaaaaatttaaaaaatagaaaatagaaacgtatagaacgccatcatgttaaacaggatacaaaccttgatgaaaacagctaacaattatgaaactattgagatattgcgtaattatttaagactgtatattattttggcacgaaatgaagaaggccgtggtatactaatatacgatgataacatagatagtattatgtcgatgatgaatattacaagattagaagttataggattgacgactcattgcacaaaattaagatcatcgcctccaattcctatgtctagattgtttatggacgaaatagatcatgagtcatattattctccaaaaacttcagattatccgttgatcgatattatacgaaagcgttcccacgaacagggagatatagcactggctttagaacaatacggtatcgagaatacagattccatatcagaaattaatgaatggttgtcgtcaaaaggtttagcatgttatagatttgtaaaatttaacgattacaggaaacagatgtatcgtaagttctctaggtgtactatagttgacagtatgataatagggcatataggtcatcattatatttggattaaaaatttagaaacatatacgcgtcccgaaattgatgtgttaccgtttgatattaaatacatatctagagatgaattgtgggcgcgaatttcttcctcgttagatcaaacacatataaaaaccatcgccgtatcagtttatggagctattactgataatggaccaatgccatatatgatatccacgtatccgggtaatacctttgttaactttaacagtgtaaaaaatctaattttaaatttcttagattggattaaagatattatgactagtacacgaactatcattctagtaggttacatgagtaatctattcgatataccgttgctaacagtatactggcccaataactgtggatggaaaatctataataatacattaatatcatccgatggtgctagggttatttggatggatgcgtataaattttcttgcggtttatctttacaagactattgttatcattggggtagcaaaccagagagccgaccattcgatttaataaaaaaatcagatgctaaacgcaattctaaatcgttggtcaaagaatctatggcatccttgaaatccttgtacgaggcattcgagacacaatcaggagcgttagaagttttaatgagtccatgtaggatgttttcgttttctagaatagaagacatgttcttaactagtgtcattaatagagtatccgagaatactggaatggggatgtattatcctaccaacgatataccttttctatttatcgaatcatctatctgtctagattatattatagtaaataatcaggaatccaacaaatatcgtatcaaatctgttctcgatatcatttcttcaaaacaataccctgcaggacgtcccaactacgttaaaaatggtacaaaaggaaagttatatatcgcgttgtgtaaagttaccgtacctactaacgaccatattccagtagtttatcacgatgatgacaatactaccacctttattacagtattgacgtccgtcgatattgaaactgctatcagagcaggatattcgatagtcgaattaggggctttacaatgggatgataatattccagaacttaaagactgtttactggatagtatcaagatgatttatgacttgaacgcagtcacaacaaataatttattggaacagctcatagaaaatattaactttaacaactctagtataatttcgttgttctatacatttgccattagttattgccgagcattcatttactcaattatggaaaccatagatccggtgtatatatctcagttcagttataaagaattatacgttagtagctcttataaagatattaatgaatccatgagtcagatggtaaaattataaaaagtgaaaaacaatattatttttatcgttggttgtttcactatggggttttgcattccattgagatcaaagatgttgaagagaggatctagaaaatcctcttccatactggctaggcgtcctactcctaaaaaaatgaacatagttactgatttggaaaatcgtttaaagaagaatagctatatagaaaatactaatcagggaaacattctgatggatagcatcttcgtatccactatgccggtagaaacattgtttggatcgtacataactgatgacagtgatgattatgaacttaaggatttactcaatgttacatataacattaaaccggtcatagttcctgacatcaagttagatgctgtattagatagagatggaaattttagaccagctgactgtttcttggttaaactgaaacatagagatggattcaccaaaggagctctctatcttggtcacagtgcaggatttacggcaacaatctgcttaaaaaatgagggggtttcagggctttacattccaggtacttctgtaattcggtccaatatctgtcaaggagatactatcgtcagtagatcatctagaggagttcaatttcttccacaaataggaggagaagctatcttcttgattgtttcactttgtcctaccaaaaagttagtagaaacaggattcgtcattccagaaatatcgtcaaatgataacgccaaaatcgctgctcgcattctatcagagaaacgcaaggacaccattgctcatattgacactctaatacaacacaggcaacaattggaattggcttactataattcctgcatgttaaccgagtttctgcattattgtaattcgtatgctggcaccatcaaagaatcacttctaaaagaaacaattcaaaaagatatcaatatcacacatacaaatattactaccctattgaatgagacagccaaggttatcaagttagtaaaatctctggtagataaagaagatactgatattgtgaataatttcattactaaagaaattaaaaacagagacaaaatagttaatagtttgtctctatcaaacctggactttcgtttgtaaattggggctttttgtacaataaatgggtgttgccaatgattcatcccctgaatatcaatggatgtctccccatagattatcagatactgttatattaggagactgtttgtattttaacaatataatgtcccaattagatttacaccaaaattgggctccgtcagttagattgttaaattattttaagaattttaatagggaaacactactaaagatagaagagaatgattacattaattcatcctttttccaacaaaaggataaacgattttatcctataaacgacgatttttatcacatatctacaggaggatatggtatagtctttaagatagataactatgtagtaaaatttgtattcgaggccacaaaattatatagtcccatggaaactacggcggagttcacagtacccaaatttctatacaacaatctaaagggagatgaaaaaaaattaatcgtgtgtgcgtgggccatgggattaaactataaattaacatttttacatactctgtataaacgggttcttcatatgttgctattattgatacaaactatggatggtcaggaactctcattgagatattcttctaaagtttttttaaaggcgtttaacgagagaaaggacagtatcaaattcgtgaaattactatcccacttttacccggcagttattaacagtaatattaatgttataaactattttaaccgcatgtttcactttttcgaacatgaaaagagaactaactacgaatacgaaagaggaaatattataatttttcccctagcactgtattctgcagataaagtagataccgagttagctatcaaattaggatttaaatctttggtacaatacataaagtttatctttttacagatggctctgttatacattaaaatttacgaactaccatgctgcgacaactttttacacgcagatcttaaacccgataatatcttactttttgattccaatgaaccaataataattcatctaaaggataaaaagtttgtttttaatgaacgtattaaatcggcattaaacgactttgacttttcccaagtggctggaatcattaacaagaaaataaaaaacaatttcaaagttaaacataactggtattacgatttccatttctttgttcatactttattaaaaacatatccagaaatcgaaaaagatatcgaatttagtacagcattagaagaattcatcatgtgtaccaagacagactgtgataaatatagattaaaggtttccattcttcacccaattagtttcttggaaaaatttattatgagagacattttctcagactggataaatggcggaaactaaagagtttaaaactttgtataatctttttatagatagttatttacaaaaattagctcaacattctatccctactaatgtcacttgtgctattcatataggagaggttataggacagtttaaaaattgcgcgctccgaataactaacaaatgcatgagtaattctcgacttagtttcacactcatggttgaatcatttattgaagtgatttcattgcttccggaaaaggatagaagagctatcgctgaggaaataggaatagatctagatgatgtacctagtgtagtatccaagctagaaaagaactgtaatgcgtatgcggaggttaataatattatagatatacagaaattggatatcggagaatgttcggctccgcccggccaacatatgcttttacagatagttaatacaggatccgcggaagcaaattgtggtttacagacaattgttaagtccttaaataaaatatacgttccacctattatcgaaaaccgattgccgtattacgatccgtggtttctagtgggtgtagcaattattctagttatttttactgtagctatttgttctattagacgaaatctggctcttaaatacagatacggaacgtttttatacgtttaattaataaaaaaatttaattacaaggtataaaatagtactccatctacgcaatcgcgataatggagggatctaaacgcagacacgacagtcggcgactacaacaagaacaggagcagcttcgtccacgtacaccgccatcatatgaagaaattgcaaaatatggacactcatttaacgtgaaaagatttacgaataaagaaatgtgtcttaaaaatgattatccacgaattatatcatataatcctccaccaaaatagagtatatatatatcatcatttcatgatgtatactactgacatagtttcaatgtgaacttttcactttcttaccggttatgaagaatatttttattttaatggtcattaccagtatattataattgaaaatgaattagtttaatatgacgctcgtcatgggatcctgctgtggtagattctgtgacgctaagaataagaataagaaggaagatgtagaagagggaagagaaggatgttacaattataagaaccttaatgatctggatgaatccgaagcacgtgtagaatttggaccattatatatgataaatgaagaaaaatcagacataaatacattggatataaaaagaagatatagacacacgatagagtctgtatatttctaaaagtttttataaaaaatgagtaaaatactcacgtttgttaaaaataagataattgacttgattaataatgaccaaattaaatattctagagttataatgatagaagagtccgatagtcttttaccggttgatgaggtgcatgctaaccacggatttgactgtgtggagatgatagatgaaaatataagcaatgagaatatcgaacagtataaaaccgaatctttttttacaataaattgaaatcaaaacatttattaaaccgcatcaagatgggtacgaacggcgttagagtatttgtcattttatatttgttggctgtatgcggatgtatcgaatacgacgtagacgataatgtacatatttgtacccacactaacgtgtcacatattaatcacactagttggtattataatgataaggttatagcgctagccaccgaggataaaacttctggttatatatcatcattcataaaacgcgttaatatctcattaacttgtttaaatatatcgagtttgaggtacgaagattctggtacatacaaaggagtatcgcatctaaaagatggagtcatcgttacgactactatgaatatatctgtaaaggctaatatcattgacttgactggtagagtgcgttatctaaccagaaattattgcgaagttaaaatacgatgcgaaataacatctttcgcgcttaatggttctactacaccaccacatatgatattaggaacagtagataaatggaaatatcttccatttcctacagatgattatagatacgtaggggaactgaaaagatatatatctggaaacccatatccaacagagtcgctagcgttagaaattagctcgacgtttaatcggtttactatcgttaaaaatttgaacgataacgagttttcttgttatctgttttcacaaaattatagtttccataaaatgttgaatgtgcgtaacatttgtgaatccaaatggaaggcgttaaataataatgataatgcatcctccatgcccgcttcccacaacaatctcgcaaacgatttatttagtatgatgtcacaattacaaaatgataatgatgataataacgattattcagcacccatgaatgtcgataatttaattatgatagtactaataacaatgctatcaataatacttgtaattattgtagtgattgcggcgatatcgatgtacaaaaaatccaagtacaggcatatagataactgaaaaaaaatttattgatattgttaatttagttatggaacccatccttgcaccaaatccaaatagatttgttattttcccaatccaatattatgacatctggaacatgtataaaaaggcagaggcatcattttggacagtggaagaagtagatatatctaaagatatcaatgattggaataaactaacaccagacgaaaaatattttataaaacatgtattggcgttttttgcagccagtgacggaatagtgaatgaaaatttggcggaacgattttgtacagaagtacagattaccgaggctagatgtttctacggatttcagatggccattgaaaacattcattcggaaatgtatagtcttttgatcgatacttatgttaaagatagtaatgaaaaaaactatctctttaatgccatagaaacaatgccttgtgtaaaaaagaaggccgattgggctcaaaagtggatacatgacagcgccggttatggagagagacttattgcctttgctgcagtagaaggaatcttcttttccggatcattcgcttccatattttggcttaaaaagcgtggcctaatgcccggactcacgttttccaacgaactaattagtagagacgagggtctacactgcgacttcgcatgtttgatgtttaaacatttattgtatccaccgagtgaagaaaccgttagatctattataacagatgcagtatccattgaacaagaatttcttactgcggctcttccagttaaacttataggaatgaattgtgaaatgatgaaaacatatatagaattcgtcgcggatagattgatttctgaattgggatttaaaaaaatttataatgttaccaatccgtttgatttcatggaaaatatatcattggaaggaaaaactaattttttcgaaaaacgtgtgggtgaataccaaaaaatgggagttatgtctcaaaaagataatcatttttctctagatgttgacttttaaagaaacataaatgccgatatttgttaatactgtgtactgtaagaatatattagcattgtctatgactaagaaattcaaaacaattattgatgctataggtggcaatataatagtcaattctacgatattgaaaaagttatctccttactttcgcacacatttacgtcaaaaatacacgaaaaataaagatccagttacgagggtttgtctagaccttgacattcacagtttaacttctatagttatttactcgtatactggaaaggtatatatagatagtcataacgtcgtcaatttattacgtgcttctatattaacctctgtagaatttatcatctacacttgtataaactttatcttacgagattttagaaaggaatattgtgtcgagtgttacatgatgggtatagaatacggactatccaatctcttatgtcatactaaaaactttattgccaaacactttttggaactggaagatgacatcatagacaattttgattatctatctatgaaacttattctagaaagcgatgaactaaatgttccagatgaggattatgtagttgattttgtcattaagtggtatataaagcgaagaaataaattaggaaatctgctactccttatcaaaaatgtaatcaggtcaaattatctttctcccagaggtataaataatgtaaaatggatactagactgtaccaaaatatttcattgtgataaacaaccacgcaaatcatacaagtatccattcatagagtatcctatgaacatggatcaaattatagatatattccatatgtgtacaagtactcatgttggagaagtagtatatctcatcggtggatggatgaacaatgaaatacataacaatgctatagctgtaaattatatatcaaacaattggattccaattcctccgatgaatagccccagactgtatgctagcgggatacccgctaacaataaattatacgtagtaggaggtctaccaaatcccacatctgttgagcgttggttccacggggatgctgcttgggttaatatgccgagtcttctgaaacctagatgtaatccagcagtggcatccataaacaatgttatatacgtaatgggaggacattctgaaactgatacaactacagaatatttgctacccaatcatgatcagtggcagtttggaccatccacttattatcctcattataaatcatgcgcgttagtgttcggtagaaggttattcttggttggtagaaatgcggaattttattgtgaatccagcaatacatggactctgatagatgatcctatttatccgagggataatccagaattgatcatagtggataataaactgctattgataggaggattttatcgtgaatcgtatatagatactatagaagtgtacaatcatcacacttattcatggaatatatgggatggtaaataattttgaaataaaatattagttttatgttcaacatgaatattaactcaccagttagatttgttaaggaaactaacagagctaaatctcctactaggcaatcgccgggtgctgccggatatgatttgtatagcgcttacgattatactatccctccaggagaaagacagttaattaagacagatattagtatgtccatgcctaagatttgctatggtagaatagctcctaggtctggtctgtcactaaaaggcattgatataggaggtggtgtaatagacgaagattataggggaaacataggagtcattcttattaataatggaaaatgtacgtttaatgtaaatactggagatagaatagctcagctaatctatcaacgtatatattatccagaactggaagaagtacaatctctagatagtacaaatagaggagatcaagggtttggatcaacaggacttagataataaacaatagtatgttgtcgatgtttatgtgtaataatatcgtagattatgtagatgatatagataatggtatagtacatgatatagaagatgaggctagcaataatgttgatcacgactatgtatatccacttccagaaaatatggtatatagatttgacaagtccactaacatactcgattatctatcaacggaacgggaccatgtaatgatggctgttcgatactatatgagtaaacaacgtttagacgacttgtatagacagttgcccacaaagactagatcatatatagatattatcaacatatattgtgataaagttagtaatgattataatagggacatgaatatcatgtatgatatggcatctacaaaatcatttacagtttatgacataaataacgaagttaatactatactaatggataacaaggggttgggtgtaagattggcgacaatttcatttataaccaaattgggtagacgatgtatgaatccagtaaaaactataaaaatgtttactctactatcgcatactatatgcgatgattgttttgtagattatataacggacatttcaccaccagataataccatccctaacactagcacgcgtgaatatctaaagcttattggcatcacagctatcatgtttgctacatataaaactctcaaatacatgataggataattttttttaacacggatatagaatgctaacgtaataattatgcgttatgaagacccctatatcatcaattcaattttttttctagaaaaagtatcaagatgtttatattatcgtcggtcatcagatctgtaatgtttcccaatgattggaatctagattctgaaatctttttgtatccccaatgttcagtgattttagcacatattcctatggtagcgaatagactttcctgatcatggacttttgtaaaattgatgtagtggtctccttcgctcatagcttcgacaatctcattaattttatcaataccatagtaccgtatagcgacatcatcgaacttcatcaattccttgtacagtcttccacaactggtaatatctttgttaaacactataacatgatttctccacgtaatatattcatctattagatcgatgatggagtcgcgactacatattttatcatcatccacaaagtaaaaaacagcatcctcataatctaatttagtcgccatgactatctcacaaaagacagtagccgtctccttcctctatattgatttaattgtatgtttttacaattatcaataaaacataaaaataatatgatcatcaaacgaactgttaatattgatagttatataacgtgaatcatgagtgcaaactgtatgttcaatctggacaatgattacatatattggaaacctattacatatcctaaggcattagtattcataagtcatggagctggtaaacattctggacgttatgacgaactagctgaaaacatatcatcgttaggaattttagtattctcacatgatcatattggacatggaagaagtaatggtgaaaaaatgatgattgatgactttggtacagcacgtggtaactattaaatctacttattgggtcattccatgggagcaacaatttctatactagcctcttacgataatccaaacttgtttacagcaatgattctaatgtctcctctagttaatgcagatgctgtttcaaaactgaatctgctagctgccaaacttatgggaaccatcacaccaaatgcgccagtcggaaagctatgtccagaatcagtatctagagatatggataaagtttataaataccaatacgacccattaatcaatcatgaaaaaattaaggctggatttgctagtcaggtcttgaaggctaccaacaaggttagaaaaataattcccaagattaacaccccccgactctcatactccagggaacaaacaatgagattagtgatgtttcaggtgcatattatttcatgcaacatgcaaattgtaatagagaaataaaaatttatgaaggtgccaaacatcatcttcataaggaaacggatgaagttaaaaaatcagtcatgaaagaaatagaaacttggatttttaatagagtgaagtgatataggattattttttaacaaataaaatgaatccggataatacaatcgcagtgattacagagactattcctataggtatgcaatttgataaagtatatttgtctacatttaacatgtggagggaaattctatccaataccacaaaaacactagatatatcatctttttattggagtttatcggatgaagtgggtacgaatttcggcacgataatattaaacgagattgtacaattacccaaaagaggagtaagagttagagtagccgtcaataaatctaacaaaccattaaaggatgttgaaagactacaaatggccggagttgaagtacgatacatagatattacaaatatcctaggaggagttcttcatacaaaattttggatatctgataatacacatatttatttaggaagcgctaacatggattggagatcactaactcaggtcaaagaattgggtattgcgatcttcaataataggaacttggcagcggatctcactcaaatttttgaggtatactggtatcttggagttaacaatctaccatataattggaaaaacttttatccgtcgtattataatacagatcatcctcttagtattaacgtaagtggtgttccacactctgtatttattgcttctgcaccgcaacaactatgtactatggaaagaaccaatgatttaaccgctttattgtcatgtattagaaatgcgagtaaattcgtttatgtatctgttatgaactttatccctattatttattcgaaggcgggtaaaattttgttttggccttatatagaagatgaattaagaagatccgctatagacagacaagtatccgttaagctattgattagttgctggcaacgatcttcgtttatcatgagaaactttttaagatctatcgctatgctaaaatctaaaaacatagatatagaagtaaagctatttattgtaccagatgctgatcctcccattccgtattctagggtaaaccatgccaaatatatggtaaccgataaaacggcctatataggtacctcaaattggacaggaaattactttacggatacatgtggagcatctattaatattacaccggatgatggattaggtcttcgtcaacaattggaagatatttttatgcgtgattggaattcaaaatacagctatgaattgtacgatactagtcctactaaaaggtgtaaactattaaaaaatatgaaacaatgtacaaatgatatatactgcgatgagatacaaccggaaaaagaaattcctgaatattctcttgaataaaatagatataaaaacataatttttatcccaatttacgagcccgttaacaagatgcttgcattttgttattcgttgcccaatgcgggtgatgtaataaagggcagagtatacgagaatgattatgctctatatatttatctttttgactatcctcactttgaagctatcttggcagagagtgttaagatgcatatggatagatatgttgaatatagggataaactggtagggaaaactgtaaaagttaaagtgattagagttgattatacaaaaggatatatagatgtcaattacaaaaggatgtgtagacatcaataatttttataccgaacataaaaataaggttaattattaataccataaaatcatgattgcgttattgatactatcgttaacgtgttcagtgtctacctatcgtctgcaaggatttaccaatgccggtatagtagcgtataaaaatattcaagatgataatattgtcttctcaccgtttggttattcgttttctatgtttatgtcgctattgcctgcatcaggtaatactagaatagaattattgaagactatggatttgagaaaaagagatctgggtccagcatttacagaattaatatcaggattagctaagctgaaaacatctaaatatacgtacactgatctaacttatcaaagtttcgtagataatactgtgtgcattaaaccgttgtattatcaacaatatcatagattcggcctatatagattaaactttagacgagatgcggttaataaaattaattctatagtagaacgtagatccggtatgtctaatgtagtagattctaatatgctcgacaataatactctatgggcaatcattaatactatatattttaaaggtatatggcaatatccgtttgatatcactaaaacacgcaatgctagttttactaataagtacggtacgaaaacggttcccatgatgaacgtagttactaaattgcaaggaaatacaatcacaatcgatgacaaagaatatgacatggtacgccttccgtataaggatgctaatattagtatgtacctggcaataggtgataatatgacccatttcacagattctattacggctgcaaaattagactattggtcgtttcaattagggaataaagtgtacaatcttaaactccctaaattttctatcgaaaataagagggatattaagtcgatagccgaaatgatggctcctagtatgtttaatccagataatgcgtcgtttaaacatatgactagggacccattatatatttataaaatgtttcagaatgcaaagatagatgtcgacgaacaaggaactgtagcagaggcatctactatcatggtagctacggcgagatcatctcctgaaaaactggaatttaatacaccatttgtgttcatcatcagacatgatattactggatttatattgtttatgggtaaggtggaatctccttaatatgggtacggtgtaaggaatcattattttatttatattgatgggtacgtgaaatctgaattttcttaataaatattatttttattaaatgtgtatatgttgttttgcgatagccatgtatctactaatcagatctattagagatattattaattctggtgcaatatgacaaaattataaaaaatgaaaaaatatacactaattagcgtctcgtttcagacatggatctgtcacgaattaatacttggaagtctaagcagctgaaaagctttctctctagtaaagatacatttaaggcggatgtccatggacatagtgccttgtattatgcaatagctgataataacgtgcgtctagtatgtacgttgttgaacgctggagcattgaaaaatcttctagagaatgaatttccattacatcaggcagccacattggaagataccaaaatagtaaagattttgctattcagtggactggatgattcacaatttgatgacaagggaaacactgcattgtattatgcggttgatagtggtaacatgcaaacggtaaaactgtttgttaagaaaaattggagactgatgttctatgggaaaactggatggaaaacttcattttatcatgccgtcatgcttaatgatgtaagtattgtttcctactttctttcagagataccatctacttttgatctggctattctccttagttgtattcacatcactataaaaaatggacacgtggatatgatgattctcttgctcgactatatgacgtcgacaaacaccaataattcccttctcttcattccggacattaaattggctatagataataaagacattgagatgttacaggctctgttcaaatacgacattaatatctattctgctaatctggaaaatgtactattggatgatgccgaaatagctaaaatgattatagaaaagcatgttgaatacaagtctgactcctatacaaaagatctcgatatcgtcaagaataataaattggatgaaataattagcaaaaacaaggaactcagactcatgtacgtcaattgtgtaaagaaaaactaattagattctcccacatttttgttaacattacactaactaattggtaaaattgatagaataattatgtgtatataagatagatttcctattgtcttactcattgcatcgtactattgttacatattttgagtaagatggtttacaaattagtcttgctcttttgtatcgcatctctcgggtattcggtagaatacaagaatactatatgtcctcctcgacaagattaccggtattggtactttgccgccgaactcactattggtgtaaattatgacattaattctactattattggtgagtgtcatatgagtgaaagctatatcgacagaaatgctaacatagtgttgactggatacggactagaaataaacatgaccatcatggatacggatcagagatttgtggcagcggctgagggtgttggtaaagataataaactatctgttctgttgtttaccactcagcggctagataaagttcatcacaatattagtgtgacaataacatgtatggaaatgaattgtggaaccacaaaatacgatagcgatcttccggaatcaattcataaatcatcatcgtgtgatataactataaatggatcatgtgtgacatgtgttaacttagagactgatccaacaaagattaatccccattacctacaccccaaggataaatatctttatcataattctgagtatggcatgcgtggtagttatggcgtgacatttatagatgaactaaaccagtgccttcttgacataaaagaactaagttatgatatttgttatagagagtaaattgttgcaaatatacagaaatagaaatagaaatattaatttttatactacaatggacaacattatgtcggccgagtattatctatctctttatgccaaatataatagtaaaaatttagatgtatttaggaatatgctacaagctatcgaaccttctggaaataattatcacattctacatgcgtattgtggaattaaaggactagatgaacgatttgtcgaagaacttcttcatagaggatactctccaaatgagacggatgatgatggaaattatccattgcatatagcttctaaaattaataataatagaatagtcgcgatgctgctgacgcacggcgcagatccaaacgcgtgtgataaacataataaaacacctctatattatctctcgggaacagatgatgaagtcatagagagaataaatttattggtacagtatggagccaagattaacaactcggttgatgaagaaggatgtggtccgttgttggcgtgtacagatccttcagaaagagtgtttaaaaaaataatgtccatcggattcgaagccaggatagtggataaatttggcaaaaatcatattcatagacatcttatgtcagacaatccaaaagcttctacaatctcatggatgatgaaactaggaattagtccctcaaaaccagatcatgatggaaatacacctctccatattgtatgctctaaaacagttaagtatgtagacattatagatcttttacttccatcaacggatgttaataaacaaaacaaattcggagatagtcctcttacacttcttattaagacattgagcctagcgcatcttattaacaaattgctatcgactagcaatgttattacggatcaaacagttaatatttgtatcttttatgatagagatgatgttctagaaattattaatgataaaggaaagcaatatgattctaccgattttaagatggctgttgaagtgggatccataagatgcgtcaaatatctattagacaatgatataatttgtgaagatgctatgtactacgctgtactatctgaatacaaaacaatggtagactatctattgttcaatcattttagtgtagactctgtagttaacggtcatacatgtatgagcgaatgtgtaagactaaataacccagtcattttatcgaagctgatgttacataatcctacttctgagaccatgtatctaactatgaaagctatagaaaaagatagactagataaatctattattattccgtttatcgcgtactttgtacttatgcatccggacttttgtaaaaatcgtagatactttacttcatataaacgttttgtaactgattatgttcatgaaggagtatcttacgaagtattcgatgattatttttaacaaaataacataaaaataatatatttttttatgattcgatcatgacgtcctctgcaatggataataatgaacctaaagtactagaaatggtatatgatgctacaattttacccgaaggtagtagcatggatccaaatatcattgattgtataaacagacacatcaatatgtgtatacaacgcacctatagttctagtataattgccattttggatagattcctaacaatgaacaaggatgaactaaacaatacacagtgtcatataattaaagaatttatgacatacgaacaaatggcgattgaccattatggaggatatgtgaacgctattctatatcaaattcgtaaaagacctaatcaacatcacaccattgatctgtttaaaagaataaaaagaacccggtatgacacttttaaagtggatcccgtagaattcgtcaaaaaagttatcggatttgtatctatcttgaacaaatataaaccggtttatagttacgtcctgtacgagaacgtcctgtacgatgagttcaaatgtttcattgactacgtggaaactaagtatttctaaaattaatgatgcattaattttttgtattgattctcaatcctaaaaactaaaatatgaataagtattaaacatagcggtgtactaattgatttaacataaaaaatagttgttaactaatcatgaggactctacttattagatatattctttggagaaatgacaacgatcaaacctattataatgatgattttaaaaagcttatgttgttggatgaattggtagatgacggcgatgtatgtacattgattaagaacatgagaatgacgctgtccgacggtccattgctagatagattgaatcaaccagttaataatatagaagacgctaagcgaatgatcgctattagtgccaaagtggctagagacattggtgaacgttcagaaattagatgggaagagtcattcaccatactctttaggatgattgaaacatattttgatgatctaatgattgatctatatggtgaaaaataataaaataagtaatagctgccgaatgataatgagtactaaccctaataatattttaatgagacatctcaaaaatcttacagatgatgaatttaaatgtattattcatcgatcatctgattttctttatttgtctgatcgtgactatactagtataaccaaagaaacattagttagtgagatcgtagaagaatatccggatgattgtaataaaatattagctattatatttttggtgttagataaagacatagatgtagatataaaaactaaactaaagcctaaacccgcagttagatttgccattctagacaagatgactgaggatattaaactaacggatctagtcagacattattttagatacatagaacaagatataccactaggtccgttgttcaaaaaaatagattcgtacagaacaagagccattaataagtattcgaaagagttaggattggctactgaatactttaataagtacgggcatttaatgttttatactctccctataccatataacagattcttttgtagaaattcgataggctttttagcggttctatcgcctacgataggacacgtaaaagcattttataaattcatagaatacgtttctatagatgatagacggaaatttaaaaaggaattaatgtcaaaatgatttttataaaaatattgaatatataaacgtttacattatactataattacttatagtacttcaagaatggaaagcgtgatattttctatcaatggggaaattatacaagtgaataaggaaattattacggcgtctccgtataatttttttaaacgcattcaggagcaccatataaatgatgaagtgattatattgaatggtataaactatcacgcgtttgaatcgctattagactatatgcgctggaagaagataaacatcaccataaacaatgtagaaatgatactagttgctgccgtaataattgatgttacgcctgtagtagatctatgtgtaaaaactatgattcataatattaattccacaaattgtataaggatgtttaacttttctaaaagatatggaattaaaaaactatataatgcgtcgatgtcagaaataatcaacaatattactgcggtgacatccgatccagaatttggaaaattatcaaaggatgaactgacaactatcttatcccacgaagacgttaacgtaaatcatgaggatgttacagctatgatattattaaagtggatacataaaaatccaaacgatgtagatatcatcaacattttacatcccaagtttatgactaatactatgcgcaatgctatatcattgttgggattaactatatccaaatctacaaagccagtgacacgaaatggtataaaacataatatagtagtcattaaaaactctgattatatatccacaataacccattactctcctagaacagaatattggacgatagtcggtaatacagatagacaattctataatgcaaatgttttacataattgtctatacattattggcggcatgattaacaatagacatgtttattccgtatcgcgggtagatcttgaaacgaaaaaatggaaaacggttactaatatgtcgtcgttaaaatcagaagttagtacttgtgttaacgatggaaagttatatgtaataggaggattagaattttctatttcaacgggtgtggcagaatatttgaaacacggcacttcgaaatggataagacttccaaacttaattactcctagatattcaggcgcgtcggtattcgtaaacgatgatatatatgtaatgggtggagtttataccacgtatgaaaaatatgtagtattaaacgatgtggaatgtttcactaaaaatcgttggataaaaaagtctcccatgcctagacatcatagtatagtttatgctgtagagtacgacggcgacatctatgcaattactggaattacttatgagactcgtaattatctatacaaatatatagttaaggaagacaaatggatagaattatacatgtactttaaccatgtaggaaagatgttcgtgtgttcttgcggtgattatatcttaattatagcagatgcaaaatacgaatattatccaaaatcaaatacttggaatttgttcgatatgtcaactcgtaatatcgaatattatgatatgtttactaaagatgaaactccaaagtgtaacgtaactcataagtcactgccatcgtttttgagcaactgtgaaaaacaatttctacaatagcaaacatatatgggcttttttattatttgtacgatgtccaggataacatttttacggataaataaatatgaaggtggagagcgtgacgttcctgacattgttgggaataggatgcgttctatcatactgtcctattccttcacgtcccattaatataaaatttaagaatagtgtggaaactaatgctaattacaacataggagacactatagaatatctatgtctacctggatacagaaagcaaaaaatgggacctatatatgctaaatgtacaggtactggatggacactctttaatcaatgtattaaacggagatgcccatcgcctcgagatatcgataatggccaacttgatattggcggagtagactttggctctagtataacgtactcttgtaatagcggatatcagttgataggagaatctaaatcgtattgtgaattaggatctactggatctatggtatggaatcccgaggcacctatttgtgaatctgttaaatgccaatcccctccatctatatccaacggaagacataacggatacgaggatttttataccgatgggagcgttgtaacttatagttgcaatagtggatattcgttgattggtaactctggtgtcctgtgttcaggaggagaatggtccgatccacccacgtgtcagattgttaaatgtccacatcctacaatatcaaacggatacttgtctagcgggtttaaaagatcatactcatacaacgacaatgtagactttaagtgcaagtacggatataaactatctggttcctcatcatctacttgctctccaggaaatacatggcagccggaacttccaaaatgtgtacgctaataagcataaaacataaaaattatacaatggtttatgtcagctactttgtgtccgtagtgatataaaatggatactattaaaatatttaatcatggagcgtttgatactattaaaaatgaattggtcaacttgttaaaagttgtaaaatggaacaccattaattcaaatgtaacggtatcatctaccgacacaataaatatatcagagagatattatataaacagtttaaaaatgtacgaaatatagaggtgagcaagtgatatatttttcataaaatataatagatttaatgatactactctaacagatgataatgtgggatattatttagtgatttatttgaatcggacgaaatctgtaaagactttaatatatcctactccagaaacagtgataacatcatccgaggatataatgttttctaaatctcttaactgtagatttgagaatgtaaagcgcgactataaattggttatgtgttctatatgcagaatccaatacgataacaataaatatatagatattagcgacagtcaagaatgtaataatatatgttactgcgtcataactatggatccccaccacttgatagatttagaaaccatatgtgtcttggtcgataaatcaggaaagtgtttgctagtaaacgagttttatattagatttaggaaaaatcacatctacaatagctttaccgatctatgcatggattatatatttgaactaccgaatacaaaagaattattcactctgcgcaacgatgatggacgaaacatagcctgggataatgataagttggaaagtggtaataatacatggattcctaaaacagatgatgagtataagtttctatctaaattgatgaatattgcgaagtttaacaacaccaaatttgattactacgtgcttgttggagatacggatccgtgtactgtctttacgttcaaagtaacaaagtattacatcaatctcaattatgaatagtattggttaaaaatgaaaatggatttttattttatgcggttatcataacgtaccgtacaatcatggcgtatatgaacagatcagatctcgataaactaaaacacgaaaatatcttttctgggaatattatagaggacgccaaagagttcgtctttggatctagaaaaatatatactgattctgttgatgatctaatagaattatatagtttagccaaatatcttaacaacgaaaatcttaaagatgtagtgattgagagaatggattatgtgtgcaaatatatcggtaaagataattggagtactatatattcgttttataaagaaaatggtctacgtaatagttttctacgacaatacatcaacaataatatagaagagatatgtaacacagaccaatttctaaaattggatgtagattcagtatgtgatattctagacaacgatgagatcgtagtaactagagaatatactatcttaaacatggtattacgatggctagaaaataaaagagttaatatagacgactttactaaagttatgttcgttattcgatttaaatttataacatattctgaactcactaatgcgatagagaaaatagctccagaatacagacaatgcttacaggatctataccatatgaaaattacgcgtcctagacactttgataactagttatgattagttatgtcattctcgtttttatagagtgtactcgttactaaatattaattaatgaaataataacaattattaagacatactattcatccaacgaaaaacatttttcattaagtttatcatgaatgcgtataataaagccgattcgttttctttagagtctgattctatcaaagatgttatacacgattatatttgttggctcagtatgactgatgaaatgagaccatctatcggaaacgtctttaaagcgatggaaacgtttaagatagacgcggttagatattacgatggtaacatatacgatttagctaaagatataaatgcgatgtcattcgacagttttataagatctctacaaaatatctcttcaaagaaagataaactcactgtttatggaaccatgggactgctgtctattgtcgtagatattaacaaaggttgtgatatatccaatatcaagttcgctgccggaataatcattttaatggagtatatttttgatgacacggatctgtcgcatcttaaagtagcactctatcgtagaatacagagacgtgatgatgtagatagataattttttttcctaaactgatttctctgtttaaattcgtagcgatatataaaacaacatgtaattaattaataaactttaagacatgtgtgttatactaagatggttggcttattccatagtagcttgtggaatttataaacttatgatagtaaaactagtacccaatatgtaaagatgaaaaagtaaattactattaacgccgtcggtattcgttcatccattcagtatgggtatacagcacgaattcgacatcattattaatggagatatcgcgttgagaaatttacagttacataaaggggataactacggatgcaaactaaaaattatttcgaatgattacaagaaattaaagtttagattcattatacgcccagattggtcggaaatcgacgaggtcaaaggattaaccgtatttgcaaacaactatgcggtgaaagttaataaggtagatgacacgttctattacgtaatatatgaggctgtaatacatctgtataacaaaaaaacagagatattgatttattctgatgatgagaacgagctcttcaaacactattacccatacatcagtctaaatatgattagtaaaaagtataaagttaaagaagagaactactcatccccgtatatagaacatccgttaatcccgtatagagattatgagtccatggattaatatgagtatagtgttaaatgacacttactaaatagccaaggtgattattcgtatttttttaaggagtaaccatgtccgcaattagatttattgcgtgtctatatctcatttccatcttcggaaattgtcatgaggatccatattatcaaccatttgataaattaaacattactctagatatatacacttatgaggatctagtaccatacaccgtagacaatgacacaacttctttcgttaagatatactttaaaaaattttggattactgttatgactaaatggtgtgctccgtttattgataccgttagcgtatacacatcgcatgataatctgaatatacaattttatagtagggacgaatatgatacacaaagcgaggataaaatttgtaccattgacgttaaagcacgatgcaaccatctaacaaaaccagaagttacagtacaaaaagaagcgtacagatattcattatcttctgacctatcgtgttttgattctatagatctagacattgatctgatcgaaactaatagtactgacactacagtactgaaatcatatgagctcatgcttcccaaacgtgctaaatccatacataactgaaatgaaagaaaccaaaaaatgcgatagcatcaacaaccaatcatggttaacgataagatactctatgatagttgtaaaacatttaacatcgatgccagcagtgcacaatcattgatagaaagtggtgcaaatccattatatgagtatgatggtgaaactccattaaaggcatacgttaccaagaaaaataataatatcaaaaacgatgttgtgattttgttattgtcgtcagtcgactataaaaatatcaatgattttgatatattcgaatatctatgttctgataacatcgatatagacttattgaaattactaatttcgaaaggtatagaaataaatagtatcaaaaatggtattaatattgtagagaaatacgctacaacatcaaatcccaatgtagatgtgtttaaactattattggataaaggaatacctacatgtagcaacatacagtatggatacaagatcaaaatagaacagattagacgtgctggtgaatattataattgggatgatgaattagacgattacgattacgactacaccactgattatgatgatagaatgggtaaaacagttctctattattatattattactaggtcacaagatggttatgctacatctttggacgtgataaactatttaatttcacacgaaaaagagatgcgttattatacttatcgtgaacataccacactctattattatcttgacaaatgcgatattaaacgggaaatatttgacgcgttattcgatagtaactatagtggtcatgaactaatgaatattctatctaactatttacgtaaacagtttaggaagaaaaatcacaaaatcgataattatatagttgatcaactattattcgaccgtgatacgttttatattttagaattgtgtaatagtttacgtaataatatcctaatatccacaattcttaaaagatatacagattctatacaagatctattgttagaatatgtatcttatcatacagtatacatcaatgttattaaatgtatgattgatgaaggagctacattatatagatttaagcatataaataaatattttcaaaaatttggcaatagagatcctaaagttgtcgagtatattttaaaaaatggaaacttagttgtagataatgacaatgatgataacctaataaatattatgccattattccctaccttctctatgcgtgagttggatgtgttatcgatactaaaactttgtaagccgtatattgatgatataaacaaaatagataaacatggatgtagtatactttatcattgtattaagtcgcatagtgtcagcctagtagaatggttaatagataatggcgcagacattaatataataacaaaatatgggtttacatgtattactatttgtgttatactggcagataaatatattccagaaatagcagaattatatattaagatattggaaattattctgagtaaattaccaaccatcgaatgtattaagaaaacagttgattacctagacgatcacaggtacttattcataggtggtaataataaatcgttactgaaaatatgtatcaagtacttcatattagtcgattataagtacacatgtagcatgtatccatcatatatagaatttataaccgactgcgaaaaagaaattgcggatatgcgtcaaattaaaataaatggtacggacatgcttacagtgatgtacatgttaaataaacctacaaagaaacgatatgttaataatccgatatttacagattgggctaataagcaatataagttttataatcaaataatatataatgctaataagttaatagaacaaagtaagaaaatagacgacatgatagaggaggtatccattgacgataatcgtttatcaacactaccgttagaaattagacatttgattttctcgtacgcgttcctataaaaatagaaactataatcatataatagtgtaggttggtagtattgctcttgtgactagagactttagttaaggtactgtaaaaatagaaactataatcatataatagtgtaggttggtagtagggtactcgtgattaattttattgttaaacttgtcttaactcttaagtcttattaatatgtcttctaaagggggtagtagtggcggcatgtggagtgtctttatccatggacatgatggtagtaataaaggatctaaaacttatacatctggtggcggtggaatgtggggaggaggatcgtccagtggggttaacggaggtgtaaaatctggaactggtaaaatttaaacactaaattatttttattaataattgtacaagtttttgacatgatatttaatgacattagttgtgtgggtgtatagagttcacagtagctcattcagtcaaaatgtttgactatttggaaaatgaggaggtggctctcgatgaacttaaacagatgttgagagacagagatcctaatgataccaggaaccaattcaagaataatgctttacacgcatacctttttaatgagcattgtaataatgtcgaggtcgtcaaactactactagacagtggcactaatccattacgcaaaaattggagacagctaccccattagaagaatacacaaatagtagacatgttaaagttaaaggatatagcgatggctctactagaagccactggatttagcaacataaatgactttaatatattcagctatatgaaatccaaaaatgtagacgttgacttgataaaggtgttggtagaacatggatttgacttgagtgttaaatgtgaaaaccatcgttcagttatagaaaattatgtaatgacaatgatcctgttcctaaaattattgatttgttcatagaaaatggctgcagtgttctttatgaggacgagtactgatacgcgtatgatgattatcaactacgaaattgcggtaccgtattgcatctgtattcaaagtcggatacgagagcatatgtgcgtccggaagttgttaaatgtctaattaatcacggaatcaagccgtcttctatagataaaaactattgtacagctcttcaatattatattaagtcatctcatatagatatagacatcgttaaattgttaatgaaaggaatagataacacggcttattcatatatagacgatctaacatgttgcactcgaggaattatggctgattatctaaatagtgattatagatacaataaagatgtagatttggtcaaattgtttttggagaatggaaagcctcacggaataatgtgtagtattgtaccactatggagaaatgataaggaaaccatctttttgatattgaaaacaatgaactcggatgtcctccaacatatactaattgagtatatgacattcggcgatatccctctagtggaatatggaactgtggtaaataaagaggctatacacggatactttagaaatattaatattgattcttacacgatgaaatatctactaaaaaaggaagggagatgccatcaattatctcgatgatggagagatcccgattggacacctatgtaaatccaactatgaatgttataatttttacacttatacatacaaaaagggtctttgtgacatgtcttatgcttgcccaattcttagtactataaacatttgcctaccttatcttaaagacattaacatgattgacaaacgaggagaaacacttcttcacaaggctgttagatataataaacaatctctagtatctttactgctagaatccggttcagatgtcaacattagatcaaataacggatatacatgtatagccattgccatcaacgaatctaaaaacattgaactgctgaaaatgctattatgtcataaacctacattagattatgtgattgattcattgagagaaatatctaacatcgtagataactactatgctataaaacaatgtattaaatatgccatgattatagatgactgtacatcgtctaagattccagagtccataagtcaacgctataatgattatatagatctttgcaattaagaattgaatgagatgaaaaaaataatggtaggtggtaatactatgttctcattaatatttactgatcatggagctaaaattattcatagatatgccaataatccagaattacgtgagtattatgagttaaaacaaaataaaatatatgtggaagcatatgatattatttccaacgcaatagtgaaacatgatagaatacataaaaccatagaatcagttgatgataatacctacatttctaatcttccgtataccatcaaatacaaaatattcgagcaacaataagtattttttatacctttaaaattgataaataaattttttctagtgatattttggcaagatgagaatcctatttctcatcgctttcatgtatgggtgtgttcactcatatgttaacgcggttgaaaccaaatgttcaaatctagacattgtaacatcttctggagaatttcattgttcaggatgtgtggaacatatgcctgagtttagctacatgtattggttggcaaaggatatgagatcggacgaggatgctaaatttatagaacatttgggtgagggtatcaaggaggatgaaaccgttcgtaccatagatggtagaatcgtcactctacagaaagtccttcatgtgactgatactaataaatttgataattataggttcacttgtgtcctcgctacgctagatggcgtttcaaaaaagaatatttggctgaagtagtgcgtgctactatttttattcatgataatataatctaaatgcaattgtcttgagaatccatccaatacggcagattatattagaaacaacgaattgaattgaatttaatctttcatacgagaaaaataacgacatacgtcgtcaacaaattaaactttttatttattagttaactagcttatagaacttgctcattgttatgtttctaaaacgggtacgacatataggacaattatccgacgcaccggtttctcttcgtgttttatgccatatattgatacatgttatgcaaaatatatgattacacgaatccaataaaccaaagtatctatcgttttgagtaaacaacttcatagcaaattccacattctttttctttacttactctatacacgtcctcgtatttatccagtattttgatgatatccaactcagaaatggttgttgtattattgggtgtataggtattattagctatgtaccaatttaccaaccttcttaatattgattgataatcacatcggttatccaattaataactaaattgtagtgtatatatagaccatatatgtttctatttttttgacagttacgtatagtttcagtaagttttgattgttgtattcctgtatctctagataagttagttatatagtcccttccggcgatacgttttttccaagcccgaaattgattagccaaatgtggatttatttttgtgatattgatataatatttcggataatgcatactgttagtcttatatcatttggttcatctatgtattgtaatattgttacatgatctatagatgatgtattgattttggcaggatcgaattccatatccgcgactaaacagtgaaaaaaatgtaaatactttttaaattttaaattagtaaaacttttttttattttttatgattccaaaaatactgaatacaaagtcctaaattataaatatggagatcatactaccacaacttattattatgtatacaaggccggtgtaatagatagatatatataattctattacaccggcagacaattaccgatcggtatttgtcgttaccaacataccgtataatatgtaatatacaattccataacccattgacagttgttatacatcaaaattgcaattcttttgattacgatgttataagaatgtagttaattgatgtatgatgttaatgtgtcctctttcctcttataacatcgtaatcaaaaacttttttataatatatacctaataatgtgtcttaatagttctcgtgattcgtcaaacaatcattcttataaaatataataaagcaacgtaaaaacacataaaaataagcgtaactaataagacaatggatatttacgacgataaaggtctacagactattaaactgtttaataatgaatttgattgtataaggaatgacatcagagaattatttaaacatgtaactgattccgatagtatacaacttccgatggaagacaattctgatattatagaaaatatcagaaaaatactatatagacgattaaaaaatgtagaatgtgttgacatcgatagtacaataacttttatgaaatacgatccaaatgatgataataagcgtacgtgttctaattgggtacccttaactaataactatatggaatattgtctagtaatatatttggaaacaccgatatgtggaggcaaaataaaattataccaccctacaggaaatataaagtcggataaggatattatgtttgcaaagactctagactttaaatcaaagaaagtgttaactggacgtaagacaattgccgttctagacatatccgtttcatataatagatcaataactactattcactacaacgacgacgttgatatagatatacatactgataaaaacggaaaagagttatgttattgttatataacaatagatgatcattacttggttgatgtggaaactataggagttatagtcaatagatctggaaaatgtctgttagtaaataaccatctaggtataggtatcgttaaagataaacgtataagcgatagttttggagatgtatgtatggatacaatatttgacttttctgaagcacgagagttattttcattaactaatgatgataacagaaatatagcatgggacactgataaactagacgatgatacagatatatggactcccgtcacagaaaatgattacaaatttctttctagactagtattgtatgcaaaatctcaatcggatactgtattcgactattatgttcttactggtgatacggaaccacccactgtattcattttcaaggtaactagattttactttaatatgccgaaataaaaaatttttgtataatatctagaggtagaggtattgtttagataaatacaaataacatagatacatcgcatatttagcatttttataaatatacataagacatacactttatacatttttgtaaaaatactcataaaaaaatttataaaaattatggcacaaccatatcttgtagaggtagtttattagttcttcgagtgaacctataaacagataatagacaacacgtaataataataatgcctactaatacaagcataataccgggagatgggatatatgacgttgtagtgtttggtttttctgaacgttgatagtctactaatactacatgctgacatctaatgcctgtataaccatgagagcatctacaatacataccgtcgatatctctagcgtggatacagtcaccgtgtaaacaatatccatctccctctggaccgcataatctgatagctggaatatctgttgtagcgtttgtaatttctggcaatgtcgtttcgatagcgttaccactatcggcgaatgatctgattatcatagcagcgaacaacaacatcagataatttatcaacatttttgatggattctgtgtttatgctgtttctcagtgtgtgtttataacaagattgggaattttatattattaattcagtaatataaactaataatatattgttaattgtgtaaataatataaaaataacaatacaatattgaatgtgttgctgttaaaaatgtatgtgttaatataatagaataaaataaatgagtatgatcattttagataacgattgattttatcattacccttcattcttatattctttgcttacggaacctatatttagaaacatctactaacgattttttatgcttgcattattaatggtatgtaataccaatttgttaagtatgaatacggggtacaaacataaactgaaatttaacattatttatttatgatatatatcgttatcgttattgtttggtctataccatggatatctttaaagaactaatcgtaaaacaccctgatgaaaatgttttgatttctccagtttccattttatctactttatctattctaaatcatggagcagctggttctacagctgaacaactatcaaaatatatagagaatatgaatgagaatacacccgatgataagaaggatgacaataatgacatggacgtagatattccgtattgtgcgacactagctaccgcaaataaaatatacggtagcgatagtatcgagttccacgcctccttcctacaaaaaataaaagacgattttcaaactgtaaactttaataatgctaaccaaacaaaggaactaatcaacgaatgggttaagacaatgacaaatggtaaaattaattccttattgactagtccgctatccattaatactcgtatgacagttgttagcgccgtccattttaaagcaatgtggaaatatccattttctaaacatcttacatatacagacaagttttatatttctaagaatatagttaccagcgttgatatgatggtgggtaccgagaataacttgcaatatgtacatattaatgaattattcggaggattctctattatcgatattccatacgagggaaactctagtatggtgattatactaccggacgacatagaaggtatatataacatagaaaaaaatataacagatgaaaaatttaaaaaatggtgtggtatgttatctactaaaagtatagacttgtatatgccaaagtttaaagtggaaatgacagaaccgtataatctggtaccgattttagaaaatttaggacttactaatatattcggatattatgcagattttagcaagatgtgtaatgaaactatcactgtagaaaaatttctacatacgacgtttatagatgttaatgaggagtatacagaagcatcggccgttacaggagtatttatgactaacttttcgatggtatatcgtacgaaggtctacataaaccatccattcatgtacatgattaaagacaccacaggacgtatactttttatagggaaatactgctatccgcaataaatataaacaaatagacttttatcacgtttatctatgtctaaatattacaaatagtaatagtataaactaaagctgataatacttaaaaaaataataatatcatttacaattaatagtataaactaaaaattaaacaaatcgttattataagtaatatcaaaatgatgatatacggattaatagcgtgtcttatattcgtgacttcatccatcgctagtccactttatattcccgttattccacccattacggaagataaatcgttcaatagtgtagaggtattagtttccttgtttagagatgaccaaaaagactatacggtaacttctcagttcaataactacactatcgataccaaagactggactatcggcgtactatccacacctgatggtttggatataccattgactaatataacttattggtcacggtttactataggtcgtgcattgttcaaatcagagtctgaggatattttccaaaagaaaatgagtattctaggtgtttctatagaatgtaagaagtcgtcgacattacttacttttttgaccgtgcgtaaaatgactcgagtatttaataaatttccagatatggcttattatcgaggagactgtttaaaagccgtttatgtaacaatgacttataaaaatactaaaactggagagactgattacacgtacctctctaatggggggttgcctgcatactatcgtaatggggtcgatggttgattattgattagtatattccttattcacacaaaaagaacatttttataaacatgaaaccactgtctaaatgtaattatgatcttgatttatagatgaagatcagcctttagaggattttaaccagtatgtttaatatgaaaaaaataaacataacatattttgagattaagcgctattgtgcttaattattttgctctataaactgaatatatagccacaattattgacgggcttgtttatgaccggcaatcatgaatttacagaaattatctctggctatatatcttactgcgacatgttcgtggtgttatgaaacatgcataagaaaaactgcgttgtatcatgacattcaattggagcatgtagaagacaataaagatagtgtagcgtcgctaccgtacaagtagtcaatcaaagagaacgtagtagattgttggctacatttaattggacagatatagctgagggtgttagaaatgagttcattaaaatatgtgatatcaacggaacatatttatataattatactattgctgttagtataattattgattccacggaagaactaccaacagttactccaattacaacaacatatgaaccttctacatataattatactatcgatgatagcactgttattactactgaagaactacaagtgactcctcatatggatctccatcgatgatacatgtattaaaatactttccgaataagtcttttaaatattgtattaattatgaaaaactatgctatgcgagtatgatgcaaagatgtttaatgatacgatactagattttatctctagcgagagatgtcgttagaatcatttatcataactacgtttaataataattcatcaacgaatatcgataacatgtgtcatttatacgttaaagtctgtccgtcttctctattgtttagactgtttgtagaatgctgtgatataaacaaactagtagaaggtacgactccgttacactgttatctaatgaatgaaggatttgaatcatctgttttaaaaaacctattaaaggagtatgtcatgaatacgtttaatgttcatgacatccattacacaaatatttaactcatgatgaagttgagaatgatatgctttctgatagtatagatagctttagctaatataaaaatatattaatccactatatattctagacttgatttaaaaccgataaactactacgtactgtataagttgttaagaaaaggagcagaccctaattatgcagatgatagaggtaatacttttcttcattacttctgcatctatatgtccacttatgagaaaacgtcatttaataagatgcatcgtgaaaagaaatttattaaagagttggtaaaatatgaaaccgaaagtaaataatataggaaatacacctctacataactacgtatctcaatatgatatcactctcattcctcatccacaacccattaaaaaaatggaaattaaagccctctattagcataaacggctacaggtctacctttacaatggcctttccttgtgcccagttcagaccctgtcattgccacgctactaaggactccctgaataccgtggccgacgtcagacattgtctgactgaatacatcctgtgggtttctcatagatggacccatagagaaactgcagggcctctctacaggcttctcatctctttcagaactgatgcaacggagctctttggtggtgagttgaaggattcacttccgtgggacaatatcgacaattgcgtggagatcattaaatgtttcatcagaaatgactccatgaaaaccgccgaagaacttcgtgcaatcattggactttgtactcaatcagctatcgtctctggaagagtcttcaacgataagtatatcgacatactacttatgctgcgaaagattctgaacgagaacgactatctcaccctcttggatcatatccgcactgctaaatactaaatctccttcatgctctctcactacactttttatcatcttatgaggaatgattgccttcatcatttttcgtgaaataggaataattagcaccagaatagctatggattgcacatgtattctatgtcgtctactggatgaagatgtgacgtacaaaaaaataaaactagaaattgaaacgtgtcacaacttatcaaaacatatagatagacgaggaaacaatgcgctacattgttacgtcttcaataaatgcgatacagacattaagattgttcggctgttactctctcgcggagtcgagagactttgtagaaacaacgaaggattaactccgctaggagtatacagtaagcatagatacgtcaaatctcaaattgtgcatctactgatatccagctattcgaattcctctaacgaactcaagtcgaatataaatgatttcgatctgtattcggataatatcgacttacgtctgctaaaatacctaattgtggataaacggatacgtccgtccaagaatacgaattatgcaatcaatagtctcggattggtggatatatacgtaacgacgcctaatccgagaccagaagtattgctatggcttcttaaatcagaatgttacagcaccggttacgtatttcgtacctgtatgtacaacagtgatatgtgtaagaactctcttcattactatatatcgtctcatagagaatctcaatctctatccaaggatgtaattaaatgtttgatcaataacaatgtttccatccatggcagagacgaaggaggatctttacccatccaatactactggtctttctcaaccatagatatagagattgttaaattattattaataaaggatgtggacacgtgtagagtatacgacgtcagccctatattagaggcgtattatctaaacaagcgatttagagtaaccccatataatgtagacatggaaatcgttaatcttcttattgagagacgtcatactcttgtcgacgtaatgcgtagtattacttcgtacgattccagagaatataaccactacatcatcgataacattctaaagagatttagacaacaggatgaatccatcgtacaagccatgttgataaactacttacattacggcgatatggtcgttcgatgcatgttagataacggacaacaactatcctctgcacgactactttgttaataataatctcgtcgatgtaaacgtcgtaaggtttatcgtggaaaatatggacacgcggctgtaaatcacatatctaacaatggccgtctatgtatgtacggtctgatattatcgagatttaataattgcgggtatcactgttatgaaaccatactaatagatgtatttgatatactaagcaagtacatggataatatagatatgatcgataatgagaataaaactctactatattacgcggtcgatgtcaataatatacaatttgcaaagcggttattggaatatggagcgagtgttacaacatcacgctcgataatcaatacggccatccagaaaagtagttacagaagagaaaacaaaacgaagctagttgatttattacttagctaccatcccactctagagactatgattgacgcatttaatagagatatacgctatctatatcctgaaccattattcgcctgtatcagatacgccttaatcctagatgatgattttccttctaaagtaaagtatgatatctccggtcgtcataaggaactaaagcgctatagagtagacattaatagaatgaagaatgcctacatatcaggcgtctccatgtttgatatattatttaaacgaagcaaacgccacagattgagatacgcaaagaatccgacatcaaatggtacaaaaaagaactaacgtccatcattacagatactgtaaagaacagtgagaggatcgactccatagtggacaacattaatacagacgataacttgatttcgaaattacccatggagatactttattactccattaaataatttatcatggagcgataatgtcctgtttcatttgtttccatgacatattacaaaatcgattccgtccaagatgataaaaacatttaccggcatcataaacacggagtttattttatatgtctcgcataaacattactaaaaaaatatattgttctgtttttctttttctttttctttttctttcgtacatctctaattatgaaaaagtaaatgatgaaatgtatgagatgggcgagatggacgagattgtgagcatcgttcgcgacagtatgtggtacatacctaacgtatttatggacgacggtaagaatgaaggtcacgtttctgtcaacaatgtctgtcatatgtatttcacgttctttgatgtggatacatcgtctcatctgtttaagctagttattaaacactgcgatctgaataaacgaggtaactctccattacattgctatacgatgaatacacgatttaatccatctgtattaaagatattgttacaccacggcatgcgtaactttgatagcaaggatgaccactatcaatcgataacaagatctttgatatactaacggacaccattgatgactttagtaaatcatccgatctattgctgtgttatcttagatataaattcaatgggagcttaaactattacgttctgtacaaaggatccgaccctaattgcgccgacgaggatgaactcacttctcttcattactactgtaaacacatatccacgttctacaaaagcaattattacaagtcaagtcacactaagatgcgagccgagaagcgattcatctacgcgataatagattatggagcaaacattaacgcggttacacacttaccttcaacagtataccaaacatagtcctcgtgtggtgtatgctcttttatctcgaggatacgtaataatcttgattgtacacccatcatggaacgattgtgcaacaggtcatattctcataatgttactcaattggcacgaacaaaaggaagaaggacaacatctactttatctattcataaaacataatcaaggatacactctcaatatactacggtatctactagataggttcgacattcagaaagacgaatactataataccgcctttcaaaattgtaacaacaatgttgcctcatacatcggatacgacatcaaccttccgactaaagacggtattcgacttggtgtttgaaaacagaaacatcatatacaaggcggatgttgtgaatgacatcatccaccacagactgaaagtacctatgattaaatcgttgttctacaagatgtcagaattctctccctacgacgattactacgtaaaaaagatactagcctactgcctattaagggacgagtcattcgcggaactacatagtaaattctgtttaaacgaggactataaaagtgtatttatgaaaaatatatcattcgataagatagattccatcatcgtgacataagtcgccttaaagagattcgaatctccgacaccgacctgtatacggtatcacagctatcttaaagccatacattcagacagtcacatttcatttcccatgtacgacgatctcatagaacagtgccatctatcgatggagcgtaaaagtaaactcgtcgacaaagcactcaataaattagagtctaccatcgatggccaatctagactatcgtatttgcctccggaaattatgcgcaatatcatctaaacagtatgttgtacggaaagaaccattacaaatattatccatgatagaaagaaaatatctatatgattggagaagtaggaaacaggaacaagacgacgattactacattattaaatcatgaagtccgtattatactcgtatatattgtttctctcatgtataataataaacggaagagatatagcaccgcatgcaccatccgatggaaagtgtaaagacaacgaatacaaacgccataatttgtgtccgggaacatacgcttccagattatgcgaacacacaatgtacgccgtgtggttcgggtaccttcacatctcgcaataatcatttacccgcttgtctaagttgtaacggaagatgcgatcgtgtaacactactcacaatagaatctgtgaatgctctcccggatattattgtcttctcaaaggatcatccggatgcaaggcatgtgtttcccaaacaaaatgtggaataggatacggagtatccggagacgtcatctgttctccgtgtggtctcggaacatattctcacaccgtctcttccgcagataaatgcgaacccgtacccagaaatacctttaactatatcgatgtggaaattaatctgtatcccgtcaacgacacgtcgtgtactcggacgaccactaccggtctcagtgaatccatctcaacgtcggaactaactattactatgaatcataaagactgcgatcccgtctttcgtgatggatacttctctgtccttaataaggtagcaacttcaggtttctttacaggagaaaggtgtgcactctgaatttcgagattaaatgcaataacaaagattcttcctccaaacagttaacgaaagcaaagaatgatactatcatgccgcattcggagactgtctatctagcgtcgacatctatatactatatagtaataccaatactcaagactacgaaactgatacaatctcttatcatgtgggtaatgttctcgatgtcgatagccatatgcccggtagttgcgatatacataaactgatcactaattccaaacccacccactttttatagtaagtttttcacccataaatacaataattaatttctcgtaaaagtagaaaatatattctaatttattgcacggtaaggaagtagaatcataaagaacagtaatcaatcaatagcaatcatgaaacaatatatcgtcctggcatgcatgtgcctgccagtcttcagcaatcctcatcctcgtgtacggaagaagaaaacaaacatcatatgggaatcgatgttattatcaaagtcacaaagcaagaccaaacaccgaccaatgataagatttgccaatccgtaacggaaattacagagtccgagtcagatccagatcccgaggtggaatcagaagatgattccacatcagtcgaggatgtagatcctcctaccacttattactccatcatcggtggaggtctgagaatgaactttggattcaccaaatgtcctcagattaaatccatctcagaatccgctgatggaaacacagtgaatgctagattgtccagcgtgtccccaggacaaggtaaggactctcccgcgatcactcatgaagaagctcttgctatgatcaaagactgtgaggtgtctatcgacatcagatgtagcgaagaagagaaagacagcgacatcaagacccatccagtactcgggtctaacatctctcataagaaagtgagttacgaagatatcatcggttcaacgatcgtcgatacaaaatgcgtcaagaatctagagtttagcgttcgtatcggagacatgtgcaaggaatcatctgaacttgaggtcaaggatggattcaagtatgtcgacggatcggcatctgaaggtgcaaccgatgatacttcactcatcgattcaacaaaactcaaagcgtgtgtctgaatcgataactctattcatctgaaattggatgagtagggttaatcgaacgattcaggcacaccacgaattaaaaaagtgtaccggacactatattccggtttgcaaaacaaaaatgttcttaactacattcacaaaaagttacctctcgcgacttcttctttttctgtctcaatagtgtgatacgattatgacactattcctattcctattcctatttcctttcagggtatcacaaaaatattaaacctctttctgatggtctcataaaaaaagttttacaaaaatatttttattctctttctctctttgatggtctcataaaaaaagttttacaaaaatatttttattctctttctctctttgatggtctcataaaaaaagttttacaaaaatatttttattctct

SEQ ID NO: 6 - DNA, 181419 bp, Vaccinia virus
  source 1..181419: mol_type = genomic DNA
acataacaatgagcaagttctataagctagttaactaataaataaaaagtttaatttgttgacgacgtatgtcgttatttttctcgtatgaaagattaaattcaattcaattcgttgtttctaatataatctgccgtattggatggattctcaagacaattgcatttagattatattatcatgaataaaaatagtagcacgcactacttcagccaaatattcttttttgaaacgccatctatcgtagtgaggacacaagtgaacctataattatcaaatttattagtatcagtcacatgaaggactttctgtagagtgacgattctaccatctatggtactaacggtttcatcctccttgataccctcacccaaatgttctataaatttagcatcctcgtccgatctcatatcctttgccaaccaatacatgtagctaaaattaggcataaatttcacacatccagtgcaacgaaattctccagaagatgttacgatgtttaggttaggacatttgatttcgtcggcattaacatatgggtgaacacacccatacatgaaagcgatgagaaataggattctcatcttgccaaaatatcactagaaaaaatttatttatcaattttaaaggtataaaaaatacttattgttgctcgaatattttgtatttgatggtatacggaagattagaaatgtaggtattatcatcaactgattctatggttttatgtattctatcatgtttcactattgcgtcggaaataatatcatatgcttccacatatattttattttgttttaactcataatactcacgtaattctggattattggcatatctatgaataattttagctccatgatcagtaaatattaatgagaacatagtattaccacctaccattatttttttcatttcgttcaattcttgattgcaaagatctatataatcattatagcgttgacttatggactctggaatcttagacgatgtacagtcatctataatcatggcatatttaatacattgttttatagcatagtagttatctacgatgttagatatttctctcaatgaatcaatcacacaatctaatgtaggtttatgacataatagcattttcagcagttcaatgtttctagattcgttgatggcaatggctatacatgtatatccgttatttgatctaatgttgacatctgaaccggattctagcagtaaagatactagagattgtttattatatctaacagccttgtgaagaagtgtttctcctcgtttgtcaatcatgttaatgtctttaagataaggtaggcaaatgtttatagtactaagaattgggcaagcataagacatgtcacaaagaccctttttgtatgtataagtgtaaaaattataacattcatagttggatttacataggtgtccaatcgggatctctccatcatcgagataattgatggcatctcccttccttttttagtagatatttcatcgtgtaagaatcaatattaatatttctaaagtattcgtgtatagcctctttatttaccacagttccatattccactagagggatatcgccgaatgtcatatactcaattagtatatgttggaggacatccgagttcattgttttcaatatcaaagagatggtttccttatcatttctccatagtggtacaatactacacattattccgtgcggctttccattttccaaaaacaatttgaccaaatctacatctttattgtatctataatcactatttagataatcagccataattactcgagtgcaacatgttagatcgtctatatatgaataagcagtgttatctattcctttcattaacaatttaacgatgtctatatctatatgagatgacttaatataatattgaagagctgtacaatagtttttatctataaaagacggcttgattccgtgattaattagacatttaacaacttccggacgcacatatgctctcgtatccgactctgaatacagatgagagatgatatacagatgcaatacggtaccgcaatttcgtagttgataatcatcatacgcgtatcagtacttgtcctcataaagaacactgcagccattttctatgaacaaatcaataattttaggaacaggatcattgtcattacataattttctataactgaacgatggttttcacatttaacactcaagtcaaatccatgttctaccaacacctttatcaagtcaacgtctacatttttggatttcatatagctgaatatattaaagtcatttatgttgctaaatccagtggcttctagtagagccatcgctatatcctttaactttaacatgtctactatttgtgtattcttctaatggggtagctgtctccaatttttgcgtaatggattagtgccactgtctagtagtagtttgacgacctcgacattattacaatgctcattaaaaaggtatgcgtgtaaagcattattcttgaattggttcctggtatcattaggatctctgtctctcaacatctgtttaagttcatcgagagccacctcctcattttccagatagtcaaacattttgactgaatgagctactgtgaactctatacacccacacaactaatgtcattaaatattatttttttgaatgtatttataccatgtcaaaaacttgtacaattattaataaaaataatttagtgtttaaattttaccagttccagattttacacctccgttaaccccactttttacaccactggacgatcctcctccccacattccaccgccaccagatgtataagttttagatcctttattactaccatcatgtccatggataaagacactccacatgccgccactactaccccctttagaagacatattaataagacttaaggacaagtttaacaataaaattaatcacgagtaccctactaccaacctacactattatatgattatagtttctatttttacagtaccttaactaaagtctctagtcacaagagcaatactaccaacctacactattatatgattatagtttctatttttataggaacgcgtacgagaaaatcaaatgtctaatttctaacggtagtgttgataaacgattatcgtcaatggatacctcctctatcatgtcgtctattttcttactttgttctattaacttattagcattatatattatttgattataaaacttatattgcttattagcccaatctgtaaatatcggattattaacatatcgtttctttgtaggtttatttaacatgtacatcactgtaagcatgtccgtaccatttattttaatttgacgcatatccgcaatttctttttcgcagtcggttataaattctatatatgatggatacatgctacatgtgtacttataatcgactaatatgaagtacttgatacatattttcagtaacgatttattattaccacctatgaataagtacctgtgatcgtctaggtaatcaactgttttcttaatacattcgatggttggtaatttactcagaataatttccaatatcttaatatataattctgctatttctgggatatatttatctgccagtataacacaaatagtaatacatgtaaacccatattttgttattatattaatgtctgcgccattatctattaaccattctactaggctgacactatgcgactcaatacaatgataaagtatactacatccatgtttatctattttgtttatatcatcaatatacggcttacaaagttttagtatcgataacacatccaactcacgcatagagaaggtagggaataatggcataatatttattaggttatcatcattgtcattatctacaactaagtttccattttttaaaatatactcgacaactttaggatctctattgccaaatttttgaaaatatttatttatatgcttaaatctatataatgtagctccttcatcaatcatacatttaataacattgatgtatactgtatgataagatacatattctaacaatagatcttgtatagaatctgtatatcttttaagaattgtggatattaggatattattacgtaaactattacacaattctaaaatataaaacgtatcacggtcgaataatagttgatcaactatataattatcgattttgtgatttttcttcctaaactgtttacgtaaatagttagatagaatattcattagttcatgaccactatagttactatcgaataacgcgtcaaatatttcccgtttaatatcgcatttgtcaagataataatagagtgtggtatgttcacgataagtataataacgcatctctttttcgtgtgaaattaaatagtttatcacgtccaaagatgtagcataaccatcttgtgacctagtaataatataataatagagaactgttttacccattctatcatcataatcagtggtgtagtcgtaatcgtaatcgtctaattcatcatcccaattataatattcaccagcacgtctaatctgttctattttgatcttgtatccatactgtatgttgctacatgtaggtattcctttatccaataatagtttaaacacatctacattgggatttgatgttgtagcgtatttctctacaatattaataccatttttgatactatttatttctatacctttcgaaattagtaatttcaataagtctatatcgatgttatcagaacatagatattcgaatatatcaaaatcattgatatttttatagtcgactgacgacaataacaaaatcacaacatcgtttttgatattattatttttcttggtaacgtatgcctttaatggagtttcaccatcatactcatataatggatttgcaccactttctatcaatgattgtgcactgctggcatcgatgttaaatgttttacaactatcatagagtatcttatcgttaaccatgattggttgttgatgctatcgcattttttggtttctttcatttcagttatgtatggatttagcacgtttgggaagcatgagctcatatgatttcagtactgtagtgtcagtactattagtttcgatcagatcaatgtctagatctatagaatcaaaacacgataggtcagaagataatgaatatctgtacgcttctttttgtactgtaacttctggttttgttagatggttgcatcgtgctttaacatcaatggtacaaattttatcctcgctttgtgtatcatattcgtctctagtataaaattctatattcagattatcatgcgatgtgtatacgctaacggtatcaataaacggagcacaccatttagtcataacagtaatccaaaattttttaaagtatatcttaacgaaagaagttgtgtcattgtctacggtgtatggtactagatcctcataagtgtatatatctagagtaatgtttaatttattaaatggttgataatatggatcctcatgacaatttccgaagatggaaatgagatatagacatgcaataaatctaatcgaagacatggttactccttaaaaaaatacgaataatcaccttggctatttagtaagtgtcatttaacactatactcatattaatccatggactcataatctctatacgggattaacggatgttctatatacggggatgagtagttttcttctttaactttatactttttactaatcatatttagactgatgtatgggtaatagtgtttaaagagttcgttctcatcatcagaataaatcaatatctctgtttttttgttatacagatgtattacagcctcatatattacgtaatagaacgtgtcatctaccttattaactttcaccgcatagttgtttgcaaatacggttaatcctttgacctcgtcgatttccgaccaatctgggcgtataatgaatctaaactttaatttcttgtaatcattcgaaataatttttagtttgcatccgtagttatcccctttatgtaactgtaaatttctcaacgcgatatctccattaataatgatgtcgaattcgtgctgtatacccatactgaatggatgaactaacgaatatcaacggcgttaatagtaatttactttttcatctttacatattgggtactagttttactatcataagtttataaattccacaagctactatggaataagccaaccatcttagtataccacacatgtcttaaagtttattaattaattacatgttgttttatatatatcgctacgaatttaaagagaaatcagtttaggaagaaaaaaattatctatctacatcatcacgtctctgtattctacgatagagtgctactttaagatgagacatatccgtgtcatcaaaaatatactccattaaaatgattattccggcagcgaacttgatattggatatatcacaacctttgttaatatctacgacaatagacagcagtcccatggttccataaacagtgagtttatctttctttgaagcgatagtttgtagagatcttataaaaccgtcaaacgacatcgcatttatatctttagctaattcatatatgttaccatcgtaatatctaaccgcgtctatcttaaacgtttccatcgctttaaagacgtttccgatagatggtctcatttcatcagtcatactgagccaacaaatataatcgtgtataacatctttgatagaatcagactctaaagaaaacgaatcggctttattatacgcattcatgataaacttaatgaaaaatgtttttcgttgtttaagttggatgaatagtatgtcttaataattgttattatttcattaattaatatttagtaacgagtacactctataaaaacgagaatgacataactagttatcaaagtgtctaggacgcgtaattttcatatggtatagatcctgtaagcattgtctgtattctggagctattttctttatcgcattagtaagttcagaatatgttataaatttaaatcgaataacgaacatgactttagtaaagtcgtctatattaactcttttattttctagccatcgtaataccatgtttaagatagtatattctctagttactacgatctcatcgttgtctagaatatcacatactgaatctacatccaattttagaaattggtctgtgttacatatctcttctatattattgttgatgtattgtcgtagaaaactattacgtagaccattttctttataaaacgaatatatagtactccaattatctttaccgatatatttgcacacataatccattctctcaatcactacatctttaagattttcgttgttaagatatttggctaaactatataattctattagatcatcaacagaatcagtatatatttttctagatccaaagacgaactctttggcgtcctctataatattcccagaaaagatattttcgtgttttagtttatcgagatctgatctgttcatatacgccatgattgtacggtacgttatgataaccgcataaaataaaaatccattttcatttttaaccaatactattcataattgagattgatgtaatactttgttactttgaacgtaaagacagtacacggatccgtatctccaacaagcacgtagtaatcaaatttggtgttgttaaacttcgcaatattcatcaatttagatagaaacttatactcatcatctgttttaggaatccatgtattattaccactttccaacttatcattatcccaggctatgtttcgtccatcatcgttgcgcagagtgaataattcttttgtattcggtagttcaaatatatgatccatgcatagatcggcaaagctattgtagatgtgatttttcctaaatctaatataaaactcgtttactagcaaacactttcctgatttatcgaccaagacacatatggtttctaaatctatcaagtggtggggatccatagttatgacgcagtaacatagattattacattcttgactgtcgctaatatctaaatatttattgttatcgtattggattctgcatatagatggcttgtatgtcaaagatatagaacacataaccaatttatagtcgcgctttacattctcgaatctaaagttaagagatttagaaaacattatatcctcggatgatgttatcactgtttctggagtaggatatattaaagtctttacagatttcgtccgattcaaataaatcactaaataatatcccacattatcatctgttagagtagtatcattaaatctattatattttatgaaagatatatcactgctcacctctatatttcgtacatttttaaactgtttgtataatatctctctgatacaatcagatatatctattgtgtcggtagacgataccgttacatttgaattaatggtgttccattttacaacttttaacaagttgaccaattcatttctaatagtatcaaactctccatgattaaatattttaatagtatccattttatatcactacggacacaaagtagctgacataaaccattgtataatttttatgttttatgtttattagcgtacacattttggaagttccggcttccatgtatttcctggagagcaagtagatgatgaggaaccagatagtttatatccgtacttgcacttaaagtctacattgtcgttgtatgagtatgatcttttaaacccgctagacaagtatccgtttgatattgtaggatgtggacatttaacaatctgacacgtgggtggatcggaccattctcctcctgaacacaggacaccagagttaccaatcaacgaatatccactattgcaactataagttacaacgctcccatcggtataaaaatcctcgtatccgttatgtcttccgttggatatagatggaggggattggcatttaacagattcacaaataggtgcctcgggattccataccatagatccagtagatcctaattcacaatacgatttagattcaccgatcaaatgatatccgctattacaagagtacgttatactagagccaaagtctactccaccaatatcaagttggccattatcgatatctcgaggcgatgggcatctccgtttaatacattgattaaagagtgtccatccagtacctgtacatttagcatatataggtcccattttttgctttctgtatccaggtagacatagatattctatagtgtctcctatgttgtaattagcattagtttccacactattcttaaatttcatattaatgggtcgtgacggaatagtacagcatgatagaacgcatcctattcccaacaatgtcaggaacgtcacgctctccaccttcatatttatttatccgtaaaaatgttatcctggacatcgtacaaataataaaaagcccatatatgttcgctattgtagaaattgtttttcacagttgctcaaaaacgatggcagtgacttatgagttacgttacactttggagtctcatctttagtaaacatatcataatattcgatattacgagttgacatatcgaacaaattccaagtatttgattttggataatattcgtattttgcatctgctataattaagatataatcaccgcaagaacacacgaacatctttcctacatggttaaagtacatgtataattctatccatttgtcttccttaactatatatttgtatagataattacgagtctcgtgagtaattccagtaattacatagatgtcgccgtcgtactctacagcataaactatactatgatgtctaggcatgggagacttttttatccaacgatttttagtgaaacattccacatcgtttaatactacatatttttcatacgtggtataaactccacccattacatatatatcatcgtttacgaataccgacgcgcctgaatatctaggagtaattaagtttggaagtcttatccatttcgaagtgccgtgtttcaaatattctgccacacccgttgaaatagaaaattctaatcctcctattacatataactttccatcgttaacacaagtactaacttctgattttaacgacgacatattagtaaccgttttccattttttcgtttcaagatctacccgcgatacggaataaacatgtctattgttaatcatgccgccaataatgtatagacaattatgtaaaacatttgcattatagaattgtctatctgtattaccgactatcgtccaatattctgttctaggagagtaatgggttattgtggatatataatcagagtttttaatgactactatattatgttttataccatttcgtgtcactggctttgtagatttggatatagttaatcccaacaatgatatagcattgcgcatagtattagtcataaacttgggatgtaaaatgttgatgatatctacatcgtttggatttttatgtatccactttaataatatcatagctgtaacatcctcatgatttacgttaacgttttcgtgggataagatagttgtcagttcatcctttgataattttccaaattctggatcggatgtcaccgcagtaatattgttgattatttctgacatcgacgcattatatagttttttaattccatatcttttagaaaagttaaacatccttatacaatttgtggaattaatattatgaatcatagtttttacacatagatctactacaggcggaacatcaattattatggcagcaactagtatcatttctacattgtttatggtgatgtttatcttcttccagcgtatatagtctaatagcgattcaaacgcgtgatagtttataccattcaatataatcgcttcatcctttagatggtgatcctgaattcgtttaaaaaaattatacggagatgccgtaataatttccttattcacttgtataatttccccattgatagaaaatatcacgctttccattcttgaagtactataagtaattatagtataatgtaaaggtttatatattcaatattttttataaaaaaatcattttgacattaattcctttttaaatttccgtctatcatctatagaaacgtattctatgaatttataaaatgcttttacgtgtcctatcgtaggcgatagaaccgctaaaaagcctatcgaatttctacaaaagaatctgttatatggtatagggagagtataaaacattaaatgcccgtacttattaaagtattcagtagccaattctaactctttcgaatacttattaatggctcttgttctgtacgaatctatttttttgaacaacggacctagtggtatatcttgttctatgtatctaaaataatgtctgactagatccgttagtttaatatcctcagtcatcttgtctagaatggcaaatctaactgcgggtttaggctttagtttagtttttatatctacatctatgtctttatctaacaccaaaaatataatagctaatattttattacaatcatccggatattcttctacgatctcactaactaatgtttctttggttatactagtatagtcactatcggacaaataaagaaaatcagatgatcgatgaataatacatttaaattcatcatctgtaagatttttgagatgtctcattaaaatattattagggtcagtactcattatcattcggcagctattacttattttattatttttcaccatatagatcaatcattagatcatcaaaatatgtttcaatcatcctaaagagtatggtgaatgactcttcccatctaatttctgaacgttcaccaatgtctctagccactttggcactaatagcgatcattcgcttagcgtcttctatattattaactggttgattcaatctatctagcaatggaccgtcggacagcgtcattctcatgttcttaatcaatgtacatacatcgccgtcatctaccaattcatccaacaacataagctttttaaaattatcattataataggtttgatcgttgtcatttctccaaagaatatatctaataagtagagtcctcatgcttagtaatttaactattttagttaacaactattttttatgttaaatcaattagtacaccgctatgtttaatacttattcatattttagtttttaggattgagaatcaatacaaaaaattaatgcatcattaattttagaaatacttagtttccacgtagttaatgaaacatttgaactcatcgtacaggacgttctcgtacaggacgtaactataaaccggtttatatttgttcaagatagatacaaatccgataactttttttacgaattctacgggatccactttaaaagtgtcataccgggttctttttattcttttaaacagatcaatggtgtgatgttgattaggtcttttacgaatttgatatagaatagcgttcacatatcctccataatggtcaatcgccatttgttcgtatgtcataaattctttaattatatgacactgtgtattatttagttcatccttgttcatcattaggaatctatccaaaatggcaattatactagaactataggtgcgttgtatacacatattgatgtgtctgtttatacaatccatgatatttggatccatgctactaccttcgggtaaaattgtagcatcatataccatttctagtactttaggttcattattatccattgcagaggacgtcatgatcgaatcctaaaaaaatatattatttttatgttattttgttaaaaataatcatcgaatacttcgtaagatactccttcatgaacataatcagttacaaaacgtttatatgaagtaaagtatctacgatttttacaaaagtccggatgcataagtacaaagtacgcgataaacggaataataatagatttatctagtctatctttttctatagctttcatagttagatacatggtctcagaagtaggattatgtaacatcagcttcgataaaatgactgggttatttagtcttacacattcgctcatacatgtatgaccgttaactacagagtctacactaaaatgattgaacaatagatagtctaccattgtttcgtattcagatagtacagcgtagtacatagcatcttcacaaattatatcattgtctaatagatatttgacgcatcttatggatcccacttcaacagccatcttaaaatcggtagaatcatattgctttcctttatcattaataatttctaaaacatcatctctatcataaaagatacaaatattaactgtttgatccgtaataacattgctagtcgatagcaatttgttaataagatgcgctgggctcaatgtcttaataagaagtgtaagaggactatctccgaatttgttttgtttattaacatccgttgatggaagtaaaagatctataatgtctacattcttgactgttttagagcatacaatatggagaggtgtatttccatcatgatctggttttgagggactaattcctagtttcatcatccatgagattgtagaagcttttggattgtctgacataagatgtctatgaatatgatttttgccaaatttatccactatcctggcttcgaatccgatggacattatttttttaaacactctttctgaaggatctgtacacgccaacaacggaccacatccttcttcatcaaccgagttgttaatcttggctccatactgtaccaataaatttattctctctatgacttcatcatctgttcccgagagataatatagaggtgttttattatgtttatcacacgcgtttggatctgcgccgtgcgtcagcagcatcgcgactattctattattattaattttagaagctatatgcaatggataatttccatcatcatccgtctcatttggagagtatcctctatgaagaagttcttcgacaaatcgttcatctagtcctttaattccacaatacgcatgtagaatgtgataattatttccagaaggttcgatagcttgtagcatattcctaaatacatctaaatttttactattatatttggcataaagagatagataatactcggccgacataatgttgtccattgtagtataaaaattaatatttctatttctatttctgtatatttgcaacaatttactctctataacaaatatcataacttagttcttttatgtcaagaaggcactggtttagttcatctataaatgtcacgccataactaccacgcatgctatactcagaattatgataaagatatttatccttggggtgtaggtaatggggattaatctttgttggatcagtctctaagttaacacatgtcacacatgatccatttatagttatatcacacgatgatgatttatgaattgattccggaagatcgctatcgtattttgtggttccacaattcatttccatacatgttattgtcacactaatattatgatgaactttatctagccgctgagtggtaaacaacagaacagatagtttattatctttaccaacaccctcagccgctgccacaaatctctgatccgtatccatgatggtcatgtttatttctagtccgtatccagtcaacactatgttagcatttctgtcgatatagctttcactcatatgacactcaccaataatagtagaattaatgtcgtaatttacaccaatagtgagttcggcggcaaagtaccaataccggtaatcttgtcgaggaggacatatagtattcttgtattctaccgaatacccgagagatgcgatacaaaagagtaagactaatttgtaaaccatcttactcaaaatatgtaacaatagtacgatgcaatgagtaagacaataggaaatctatcttatatacacataattattctatcaattttaccaattagttagtgtaatgttaacaaaaatgtgggagaatctaattagtttttctttacacaattgacgtacatgagtctgagttccttgtttttgctaattatttcatccaatttattattcttgactatatcgagatcttttgtataggagtcagacttgtattcaacatgcttttctataatcattttagctatttcggcatcatccaatagtacattttccagattagcagaatagatattaatgtcgtatttgaacagagcctgtaacatctcaatgtctttattatctatagccaatttaatgtccggaatgaagagaagggaattattggtgtttgtcgacgtcatatagtcgagcaagagaatcatcatatccacgtgtccattttttatagtgatgtgaatacaactaaggagaatagccagatcaaaagtagatggtatctctgaaagaaagtaggaaacaatacttacatcattaagcatgacggcatgataaaatgaagttttccatccagttttcccatagaacatcagtctccaatttttcttaacaaacagttttaccgtttgcatgttaccactatcaaccgcataatacaatgcggtgtttcccttgtcatcaaattgtgaatcatccagtccactgaatagcaaaatctttactattttggtatcttccaatgtggctgcctgatgtaatggaaattcattctctagaagatttttcaatgctccagcgttcaacaacgtacatactagacgcacgttattatcagctattgcataatacaaggcactatgtccatggacatccgccttaaatgcatctttgctagagagaaagcttttcagctgcttagacttccaagtattaattcgtgacagatccatgtctgaaacgagacgctaattagtgtatattttttcattttttataattttgtcatattgcaccagaattaataatatctctaatagatctgattagtagatacatggctatcgcaaaacaacatatacacatttaataaaaataatatttattaagaaaattcagatttcacgtacccatcaatataaataaaataatgattccttacaccgtacccatattaaggagattccaccttacccataaacaatataaatccagtaatatcatgtctgatgatgaacacaaatggtgtattaaattccagtttttcaggagatgatctcgccgtagctaccataatagtagatgcctctgctacagttccttgttcgtcgacatctatctttgcattctgaaacattttataaatatataatgggtccctagtcatatgtttaaacgacgcattatctggattaaacatactaggagccatcatttcggctatcgacttaatatccctcttattttcgatagaaaatttagggagtttaagattgtacactttattccctaattgaaacgaccaatagtctaattttgcagccgtaatagaatctgtgaaatgggtcatattatcacctattgccaggtacatactaatattagcatccttatacggaaggcgtaccatatcatattcttcgtcatcgattgtgattgtatttccttgcaatttagtaactacgttcatcatgggaaccgttttcgtaccgtacttattagtaaaactagcattgcgtgttttagtgatatcaaacggatattgccatatacctttaaaatatatagtattaatgattgcccatagagtattattgtcgagcatattagaatctactacattagacataccggatctacgttctactatagaattaattttattaaccgcatctcgtctaaagtttaatctatataggccgaatctatgatattgttgataatacgacggtttaatgcacacagtattatctacgaaactttgataagttagatcagtgtacgtatatttagatgttttcagcttagctaatcctgatattaattctgtaaatgctggacccagatctctttttctcaaatccatagtcttcaataattctattctagtattacctgatgcaggcaatagcgacataaacatagaaaacgaataaccaaacggtgagaagacaatattatcatcttgaatatttttatacgctactataccggcattggtaaatccttgcagacgataggtagacactgaacacgttaacgatagtatcaataacgcaatcatgattttatggtattaataattaaccttatttttatgttcggtataaaaattattgatgtctacacatccttttgtaattgacatctatatatccttttgtataatcaactctaatcactttaacttttacagttttccctaccagtttatccctatattcaacatatctatccatatgcatcttaacactctctgccaagatagcttcaaagtgaggatagtcaaaaagataaatatatagagcataatcattctcgtatactctgccctttattacatcacccgcattgggcaacgaataacaaaatgcaagcatcttgttaacgggctcgtaaattgggataaaaattatgtttttatatctattttattcaagagaatattcaggaatttctttttccggttgtatctcatcgcagtatatatcatttgtacattgtttcatattttttaatagtctacaccttttagtaggactagtatcgtacaattcatagctgtattttgaattccaatcacgcataaaaatatcttccaattgttgacgaagacctaatccatcatccggtgtaatattaatagatgctccacatgtatccgtaaagtaatttcctgtccaatttgaggtacctatatacgccgttttatcggttaccatatatttggcatggtttaccctagaatacggaatgggaggatcagcatctggtacaataaatagctttacttctatatttatgtttttagattttagcatagcgatagatcttaaaaagtttctcatgataaacgaagatcgttgccagcaactaatcaatagcttaactgacacttgtctgtctatagcggctcttcttaattcatcttctatataaggccaaaacaaaatattgcctgccttcgaataaataatagggataaagttcataacagatacataaacgaatttactcgcatttctgatacatgacaataaagcggttaaatcattggttctttccatagtacatagttgttgcggtgcagaagcaataaatacagagtgtggaacgccgcttacgttaatactaagaggatgatctgtattataatacgacggataaaagtttttccaattatatggtagattgttaactccaagataccagtatacctcaaaaatttgagtgagatccgctgccaagttcctattattgaagatcgcaatacccaattctttgacctgagttagtgatctccaatccatgttagcgcttcctaaataaatatgtgtattatcagatatccaaaattttgtatgaagaactcctcctaggatatttgtaatatctatgtatcgtacttcaactccggccatttgtagtctttcaacatcctttaatggtttgttagatttattgacggctactctaactcgtactcctcttttgggtaattgtacaatctcgtttaatattatcgtgccgaaattcgtacccacttcatccgataaactccaataaaaagatgatatatctagtgtttttgtggtattggatagaatttccctccacatgttaaatgtagacaaatatactttatcaaattgcatacctataggaatagtctctgtaatcactgcgattgtattatccggattcattttatttgttaaaaaataatcctatatcacttcactctattaaaaatccaagtttctatttctttcatgactgattttttaacttcatccgtttccttatgaagatgatgtttggcaccttcataaatttttatttctctattacaatttgcatgttgcatgaaataatatgcacctaaaacatcgctaatcttattgtttgttccctggagtatgagagtcggggggtgttaatcttggaaattatttttctaaccttgttggtagccttcaagacctgactagcaaatccagccttaattttttcatgattgactaatgggtcgtattggtatttataaactttatccatatctctagatactgattctggacatagctttccgactggcgcatttggtgtgatggttcccataagtttggcagctagcagattcagtcttggaacagcatctgcattaactagaggagacattagaatcattgctgtaaacaagtttggattatcgtaagaggctagctcccatggaatgacccaataagtagatttaatagttaccacgtgctgtaccaaagtcatcaatcatcattttttcaccattacttcttccatgtccaatatgatcatgtgagaatactaaaattcctaacgatgatatgttttcagctagttcgtcataacgtccagaatgtttaccagctccatgacttatgaatactaatgccttaggatatgtaataggtttccaatatatgtaatcattgtccagattgaacatacagtttgcactcatgattcacgttatataactatcaatattaacagttcgtttgatgatcatattatttttatgttttattgataattgtaaaaacatacaattaaatcaatatagaggaaggagacggctactgtcttttgtgagatagtcatggcgactaaattagattatgaggatgctgttttttactttgtggatgatgataaaatatgtagtcgcgactccatcatcgatctaatagatgaatatattacgtggagaaatcatgttatagtgtttaacaaagatattaccagttgtggaagactgtacaaggaattgatgaagttcgatgatgtcgctatacggtactatggtattgataaaattaatgagattgtcgaagctatgagcgaaggagaccactacatcaattttacaaaagtccatgatcaggaaagtttattcgctaccataggaatatgtgctaaaatcactgaacattggggatacaaaaagatttcagaatctagattccaatcattgggaaacattacagatctgatgaccgacgataatataaacatcttgatactttttctagaaaaaaaattgaattgatgatataggggtcttcataacgcataattattacgttagcattctatatccgtgttaaaaaaaattatcctatcatgtatttgagagttttatatgtagcaaacatgataactgcaatacccataagctttagatattcacgcgtgctagtgttagggatggtattatctggtggtgaaatgtccgttatataatctacaaaacaatcatcgcatatagtatgcgatagtagagtaaacatttttatcgtttctactgggttcatacatcgtctacccaattcggttataaatgaaattgtcgccaatcttacacccaaccccttgttatccattagtatagtattaacttcgttatttatgtcataaactgtaaatgattttgtagatgccatatcatacatgatattcatgtccctattataatcattactaactttatcacaatatatgttgataatatctatatatgatctagtctttgtgggcaactgtctatacaagtcgtctaaacgttgtttactcatatagtatcgaacagccatcattacatggtcccgttccgttgatagataatcgagtatgttagtggacttgtcaaatctatataccatattttctggaagtggatatacatagtcgtgatcaacattattgctagcctcatcttctatatcctgtactataccattatctatatcatctacataatctacgatattattacacataaacatcgacaacatactattgtttattatctaagtcctgttgatccaaacccttgatctcctctatttgtactatctagagattgtacttcttccagttctggataatatatacgttgatagattagctgagctattctatctccagtatttacattaaacgtacattttccattattaataagaataactcctatgtttcccctataatcttcgtctattacaccgcctcctatatcaatgccttttagggacagaccagacctaggagctattctaccatagcagaacttaggcatggacatactaatatctgtcttaattaactgtcgttctccaggagggatagtataatcgtaagcgctatacaaatcatatccggcagcacccggcgattgcctagtaggagatttagctctgttagtttccttaacaaatctaactggtgagttaatattcatgttgaacataaaactaatattttatttcaaaattatttaccatcccatatattccatgaataagtgtgatgattgtacacttctatagtatctatatacgattcacgataaaatcctcctatcaatagcagtttattatccactatgatcaattctggattatccctcggataaataggatcatctatcagagtccatgtattgctggattcacaataaaattccgcatttctaccaaccaagaataaccttctaccgaacactaacgcgcatgatttataatgaggataataagtggatggtccaaactgccactgatcatgattgggtagcaaatattctgtagttgtatcagtttcagaatgtcctcccattacgtatataacattgtttatagatgccactgctggattacatctaggtttcagaagactcggcatattaacccaagcagcatccccgtggaaccaacgctcaacagatgtgggatttggtagacctcctactacgtataatttattgttagcgggtatcccgctagcatacagtctggggctattcatcggaggaattggaatccaattgtttgatatataatttacagctatagcattgttatgtatttcattgttcatccatccaccgatgagatatactacttctccaacatgagtacttgtacacatatggaatatatctataatttgatccatgttcataggatactctatgaatggatacttgtatgatttgcgtggttgtttatcacaatgaaatattttggtacagtctagtatccattttacattatttatacctctgggagaaagataatttgacctgattacatttttgataaggagtagcagatttcctaatttatttcttcgctttatataccacttaatgacaaaatcaactacataatcctcatctggaacatttagttcatcgctttctagaataagtttcatagatagataatcaaaattgtctatgatgtcatcttccagttccaaaaagtgtttggcaataaagtttttagtatgacataagagattggatagtccgtattctatacccatcatgtaacactcgacacaatattcctttctaaaatctcgtaagataaagtttatacaagtgtagatgataaattctacagaggttaatatagaagcacgtaataaattgacgacgttatgactatctatatatacctttccagtatacgagtaaataactatagaagttaaactgtgaatgtcaaggtctagacaaacccttgtaactggatctttatttttcgtgtatttttgacgtaaatgtgtgcgaaagtaaggagataactttttcaatatcgtagaattgactattatattgccacctatagcatcaataattgttttgaatttcttagtcatagacaatgctaatatattcttacagtacacagtattaacaaatatcggcatttatgtttctttaaaagtcaacatctagagaaaaatgattatctttttgagacataactcccattttttggtattcacccacacgtttttcgaaaaaattagtttttccttccaatgatatattttccatgaaatcaaacggattggtaacattataaatttttttaaatcccaattcagaaatcaatctatccgcgacgaattctatatatgttttcatcatttcacaattcattcctataagtttaactggaagagccgcagtaagaaattcttgttcaatggataccgcatctgttataatagatctaacggtttcttcactcggtggatgcaataaatgtttaaacatcaaacatgcgaaatcgcagtgcagaccctcgtctctactaattagttcgttggaaaacgtgagtccgggcattaggccacgctttttaagccaaaatatggaagcgaatgatccagaaaagaagattccttctactgcagcaaaggcaataagtctctctccataaccggcgctgtcatgtatccacttttgagcccaatcggccttcttttttacacaaggcatcgtttctatggcattaaagagatagtttttttcattactatctttaacataagtatcgatcaaaagactatacatttccgaatgaatgttttcaatggccatctgaaatccgtagaaacatctagcctcggtaatctgtacttctgtacaaaatcgttccgccaaattttcattcactattccgtcactggctgcaaaaaacgccaatacatgttttataaaatatttttcgtctggtgttagtttattccaatcattgatatctttagatatatctacttcttccactgtccaaaatgatgcctctgcctttttatacatgttccagatgtcataatattggattgggaaaataacaaatctatttggatttggtgcaaggatgggttccataactaaattaacaataacaataaattttttttcagttatctatatgcctgtacttggattttttgtacatcgatatcgccgcaatcactacaataattacaagtattattgatagcattgttattagtactatcataattaaattatcgacattcatgggtgctgaataatcgttattatcatcattatcattttgtaattgtgacatcatactagataaatcgtttgcgagattgttgtgggaagcgggcatggaggatgaattatcgttattattatttaaagcctcccattcggattcacaaatgttacgcacattcaacattttatggaaactataattttgtgaaaacagataacaagaaaactcgtcatcgttcaaatttttaacgatagtaaaccgattaaacgtcgagctaatttctaacgctagcgactctgttggatatgggtttccagatatatatcttttcagttcccctacgtatctataatcatctgtaggaaatggaagatatttccatttatctactgttcctaatatcatatgtggtggtgtagtagaaccattaagcgcgaaagatgttatttcgcatcgtattttaacttcgcaataatttctggttagataacgcactctaccagtcaagtcaatgatattagcctttacagatatattcatagtagttgtaacgatgactccatcttttagatgcgatactcctttgtatgtaccagaatcttcgtaccgcaaactcgatatatttaaacaagttaatgagatattaacgcgttttatgaatgatgatatataaccagaagttttatcctcggtggctagcgctataaccttatcattataataccaactagtgtgattaatatgtgacacgttagtgtgggtacaaatatgtacattatcgtctacgtcgtattcgatacatccgcatacagccaacaaatataaaatgacaaatactctaacgccgttcgtacccatcttgatgcggtttaataaatgttttgatttcaatttattgtaaaaaaagattcggttttatactgttcgatattctcattgcttatattttcatctatcatctccacacagtcaaatccgtggttagcatgcacctcatcaaccggtaaaagactatcggactcttctatcattataactctagaatatttaatttggtcattattaatcaagtcaattatcttatttttaacaaacgtgagtattttactcattttttataaaaacttttagaaatatacagactctatcgtgtgtctatatcttctttttatatccaatgtatttatgtctgatttttcttcatttatcatatataatggtccaaattctacacgtgcttcggattcatccagatcattaaggttcttataattgtaacatccttctcttccctcttctacatcttccttcttattcttattcttattcttattcttattcttattcttattcttattcttagcgtcacagaatctaccacagcaggatcccatgacgagcgtcatattaaactaattcattttcaattataatatacgattagtaatgaccattaaaataaaaaatattcttcataaccggcaagaaagtgaaaagttcacattgaaactatgtcagtagtatacatcatgaaatgatgatatatatattctctattttggtggaggattatatgatataattcgtggataatcattcttaagacacatttcttcattcgtaaatcttttcacgttaaatgagtgtccatattttgcaatttcttcatatgatggcggtgtacgtggacgaagctgctcctgttcttgttgtagtcgccgactgtcgtgtttgcgtttagatccctccattatcgcgattgcgtagatggagtactattatataccttgtaattaaatttttttattaattaaacgtataaaaacgttccgtatctgtatttaagagccagatttcgtctaatagaacaaatagctacagtaaaaataactagaataattgctacacccactagaaaccacggatcgtaatacggcaatcggttttcgataataggtggaacgtatattttatttaaggacttaacaattgtctgtaaaccacaatttgcttccgccgatcctgtattaactatctgtaaaagcatatgttggccgggcggagccgaacattctccgatatctaatttctgtatatctataatattattaacctccgcatacgcattacagttcttttctagcttggataccgcactaggtacatcatctagatctattcctatttcctcagcgatagctcttctatccttttccggaagcaatgaaatcacttcaataaatgattcaaccatgagtgtgaaactaagtcgagaattactcatgcatttgttagttattcggagcgcgcaatttttaaactgtcctataacctctcctatatgaatagcacaagtgacattagtagggatagaatgttgagctaatttttgtaaataactatctataaaaagattatacaaagttttaaactctttagtttccgccatttatccagtctgagaaaatgtctctcataataaatttttccaagaaactaattgggtgaagaatggaaacctttaatctatatttatcacagtctgttttggtacacatgatgaattcttctaatgctgtactaaattcgatatctttttcgatttctggatatgtttttaataaagtatgaacaaagaaatggaaatcgtaataccagttatgttcaactttgaaattgttttttattttcttgttaatgattccagccacttgggaaaagtcaaagtcgtttaatgccgatttaatacgttcattaaaaacaaactttttatcctttagatgaattattattggttcattggaatcaaaaagtaagatattatcgggtttaagatctgcgtgtaaaaagttgtcgcaacagggtagttcgtagattttaatgtataacagagccatctgtaaaaagataaactttatgtattgtaccaaagatttaaatcctaatttgatagctaactcggtatctactttatctgccgaatacagtgctaggggaaaaattataatatttcctctttcgtattcgtagttagttctcttttcatgttcgaaaaagtgaaacatgcggttaaaatagtttataacattaatattactgttaataactgccggataaaagtgggatagtaatttcacgaatttgatactgtcctttctctcgttaaacgcctttaaaaaaactttagaagaatatctcaatgagagttcctgaccatccatagtttgtatcaataatagcaacatatgaagaacccgtttatacagagtatgtaaaaatgttaatttatagtttaatcccatggcccacgcacacacgattaattttttttcatctccctttagattgttgtatagaaatttgggtactgtgaactccgccgtagtttccatgggactatataattttgtggcctcgaatacaaattttactacatagttatctatcttaaagactataccatatcctcctgtagatatgtgataaaaatcgtcgtttataggataaaatcgtttatccttttgttggaaaaaggatgaattaatgtaatcattctcttctatctttagtagtgtttccttattaaaattcttaaaataatttaacaatctaactgacggagcccaattttggtgtaaatctaattgggacattatgttgttaaaatacaaacagtctcctaatataacagtatctgataatctatggggagacatccattgatattcaggggatgaatcattggcaacacccatttattgtacaaaaagccccaatttacaaacgaaagtccaggtttgatagagacaaacaattaactattttgtctctgtttttaatttctttggtaatgaaattattcacaatatcagtatcttctttatctaccagagattttactaacttgataaccttggctgtctcattcaatagggtagtaatatttgtatgtgtgatattgatatctttttgaattgtttcttttagaagtgattctttgatggtgccagcatacgaattacaataatgcagaaactcggttaacatgcaggaattatagtaagccaattccaattgttgcctgtattgtattagagtattaatatgcgcaatggtgtccttgcgtttctctgatagaatgcgagcagcgattttggcgttatcatttgacgatatttctggaatgacgaatcctgtttctactaactttttggtaggacaaagtgaaacaatcaagaagatagcttctcctcctatttgtggaagaaattgaactcctctagatgatctactgacgatagtatctccttgacagatattggaccgaattacagaagtacctggaatgtaaagccctgaaaccccctcattttttaagcagattgttgccgtaaatcctgcactatgcccaagatagagagctcctttggtgaatccatctctatgtttcagtttaaccaagaaacagtcagctggtctaaaatttccatctctatctaatacagcatctaacttgatgtcaggaactatgaccggtttaatgttatatgtaacattgagtaaatccttaagttcataatcatcactgtcatcagttatgtacgatccaaacaatgtttctactggcatagtggatacgaagatgctatccatcagaatgtttccctgattagtattttctatatagctattcttctttaaacgattttccaaatcagtaactatgttcatttttttaggagtaggacgcctagccagtatggaagaggattttctagatcctctcttcaacatctttgatctcgatggaatgcaaaaccccatagtgaaacaaccaacgataaaaataatattgtttttcactttttataattttaccatctgactcatggattcattaatatctttataagagctactaacgtataattctttataactgaactgagatatatacaccggatctatggtttccataattgagtaaatgaatgctcggcaataactaatggcaaatgtatagaacaacgaaattatactagagttgttaaagttaatattttctatgagctgttccaataaattatttgttgtaactgcgttcaagtcataaatcatcttgatactatccagtaaaccgtgtttaagttctggaatattatcatcccattgtaaagcccctaattcgactatcgaatatcctgctctgatagcagtttcaatatcgacggacgtcaatactgtaataaaggtggtagtattgtcatcatcgtgataaactacgggaatatggtcgttagtaggtacggtgactttacacaacgcgatatataactttccttttgtaccatttttaacgtagttgggacgtcctgcagggtattgttttgaagaaatgatatcgagaacagatttgatacgatatttgttggattcctgattattcactataatataatctagacagatagatgattcgataaatagagaaggtatatcgttggtaggataatacatccccattccagtattctcggatactctattgatgacactagttaagaacatgtcttctattctagaaaacgaaaacatcctacatggactcattaaaacttctaacgctcctgattgtgtctcgaatgcctcgtacaaggatttcaaggatgccatagattctttgaccaacgatttagaattgcgtttagcatctgatttttttattaaatcgaatggtcggctctctggtttgctaccccaatgataacaatagtcttgtaaagataaaccgcaagaaaatttatacgcatccatccaaataaccctagcaccatcggatgatattaatgtattattatagattttccatccacaattattgggccagtatactgttagcaacggtatatcgaatagattactcatgtaacctactagaatgatagttcgtgtactagtcataatatctttaatccaatctaagaaatttaaaattagattttttacactgttaaagttaacaaaggtattacccggatacgtggatatcatatatggcattggtccattatcagtaatagctccataaactgatacggcgatggtttttatatgtgtttgatctaacgaggaagaaattcgcgcccacaattcatctctagatatgtatttaatatcaaacggtaacacatcaatttcgggacgcgtatatgtttctaaatttttaatccaaatataatgatgacctatatgccctattatcatactgtcaactatagtacacctagagaacttacgatacatctgtttcctataatcgttaaattttacaaatctataacatgctaaaccttttgacgacagccattcattaatttctgatatggaatctgtattctcgataccgtattgttctaaagccagtgctatatctccctgttcgtgggaacgctttcgtataatatcgatcaacggataatctgaagtttttggagaataatatgactcatgatctatttcgtccataaacaatctagacataggaattggaggcgatgatcttaattttgtgcaatgagtcgtcaatcctataacttctaatcttgtaatattcatcatcgacataatactatctatgttatcatcgtatattagtataccacggccttcttcatttcgtgccaaaataatatacagtcttaaataattacgcaatatctcaatagtttcataattgttagctgttttcatcaagatttgtaccctgtttaacatgatggcgttctatacgtttctattttctattttttaaatttttaacgatttactgtggctagatacccaatctctctcaaatatttttttagcctcgcttacaagctgtttatctatactattaaaactgacgaatccgtgattttggtaatgggttccgtcgaaatttgccgaagtgatatgaacatattcgtcgtcgactatcaacaattttgtattattctgaatagtgaaaaccttcacagatagatcattttgaacacacaacgcatctagacttttggcggttgccatagaatatacgtcgttcttatcccaattaccaactagaagtctgatcttaactcctctattaatggctgcttctataatggagttgtaaatgtcgggccaatagtagctattaccgtcgacacgtgtagtgggaactatggccaaatgttcaatatctatactagtcttagccgacttgagtttatcaataactacatcggtatctagatctctagaatatcccaataggtgttccggagaatcagtaaagaacactccacctataggattcttaatatgatacgcagtgctaactggcaaacaacaagccgcagagcataaattcaaccatgaattttttgcgctattaaaggctttaaaagtatcaaatcttctacgaagatctgtggccagcgggggataatcagaatatacacctaacgttttaatcgtatgtatagatcctccagtaaatgacgcgtttcctacataacatctttcatcatctgacacccaaaaacaaccgagtagtagtcccacattattttttttatctatattaacggttataaaatttatatccgggcagtgactttgtagctctcccagatttcttttccctcgttcatctagcaaaactattattttaatccctttttcagatgcctcttttagtttatcaaaaataagcgctcccctagtcgtactcagaggattacaacaaaaagatgctatgtatatatatttcttagctagagtgataatttcgttaaaacattcaaatgttgttaaatgatcggatctaaaatccatattttctggtagtgtttctaccagcctacattttgctcccgcaggtaccgatgcaaatggccacatttagttaacataaaaacttatacatcctgttctatcaacgattctagaatatcatcggctatatcgctaaaattttcatcaaagtcgacatcacaacctaactcagtcaatatattaagaagttccatgatgtcatcttcgtctatttctatatccgtatccattgtagattgttgaccgattatcgagtttaaatcattactaatactcaatccttcagaatacaatctgtgtttcattgtaaatttataggcggtgtatttaagttggtagattttcaattatgtatcaatatagcaacagtagttcttgctcctccttgattctagcatcctcttcattattttcttctacgtacataagcatgtccaatacgttagacaacacaccgacgatggcggccgccacagacacgaatatgactagaccgatgaccatttaaaaacccctctctagctttcacttaaactgtatcgattattcttttagaacatgtataatataaaaacattattctatttcgaatttaggcttccaaaaatttttcatccgtaaaccgataataatatatatagacttgttaatagtcggaataaatagattaatgcttaaactatcatcatctccacgattagagatacaatatttacattttttttgctgtttcgaaactttatcaatacacgttaatacaaacccaggaaggagatattgaaactgaggctgttgaaaatgaaacggtgaatacaataattcagataatgtaaaatcatgattccgtattctgatgatattagaactgctaatggatgtcgatggtatgtatctaggagtatctattttaacaaagcatcgatttgctaatatacaattatccttttgattaattgttattttattcatattcttaaaaggtttcatatttatcaattcttctacattaaaaatttccatttttaatttatgtagccccgcaatactcctcattacgtttcattttttgtctataatatccattttgttcatctcggtacatagattatccaattgagaagcgcatttagtagttttgtacattttaagtttattgacgaatcgtcgaaaactagttatagttaacattttattatttgataccctgatattaatacccctgccgttactattatttataactgatgtaatccacgtaacattagaattaattatcgatagtaatgcatcgacgcttccaaaattgtctattataaactcaccgataatttttttattgcatgttttcatattcattaggattatcaaatctttaatcttactacgattgtatgcgttgatattgcaagacgtcattctaaaagacggaggatctccatcaaatgccagacaatcacgtacaaagtacatggaaataggttttgttctattgcgcatcatagatttatatagaacacccgtagaaatactaatttgttttactctataaaatactaatgcatctatttcatcgttttgtataacgtctttccaagtgtcaaattccaaatttttttcattgatagtaccaaattcttctatctctttaactacttgcatagataggtaattacagtgatgcctacatgccgttttttgaaactgaatagatgcgtctagaagcgatgctacgctagtcacaatcaccactttcatatttagaatatatgtatgtaaaaatatagtagaatttcattttgtttttttctatgctataaatgaattctcattttgcatctgctcatactccgttttatatcaataccaaagaaggaagatatctggttctaaaagccgttaaagtatgcgatgttagaactgtagaatgcgaaggaagtaaagcttcctgcgtactcaaagtagataaaccctcatcgcccgcgtgtgagagaagaccttcgtccccgtccagatgcgagagaatgaataaccctggaaaacaagttccgtttatgaggacggacatgctacaaaatatgttcgcggctaatcgcgacaacgtggcgtcgagacttttgaactaaaatacaattatatccttttcgatattaataaatccgtgtcgtccaggttttttatctctttcagtatgtgaatagataggtattttatctctattcatcatcgaatttaagagatccgataaacattgtttgtattctccagatgtcagcatctgatacaacaatatatgtgcacataaacctctggcacttatttcatgtaccttccccttatcactaaggagaatagtatttgagaaatatgtatacatgatattatcatgaattagatatacagaatttgtaacactctcgaaatcacacgatgtgtcggcgttaagatctaatatatcactcgataacacattttcatctagatacactagacattttttaaagctaaaatagtctttagtagtgacagtaactatgcgattattttcatcgatgatacatttcatcggcatattattacgcttaccatcaaagactataccatgtgtatatctaacgtattctagcatggttgccatacgcgcattaaacttttcaggatctttggatagatcttccaatctatctatttgagaaaacatttttatcatgttcaatagttgaaacgtcggatccactatatagatattatctataaagattttaggaactacgttcatggtatcctggcgaatattaaaactatcaatgatatgattatcgttttcatcttttatcaccatatagtttctaagatatgggattttacttaatataatattatttcccgtgataaattttattagaaaggccaaatctataagaaaagttctagaattagtctgaagaatatctatatcgccgtatagtatatttggattaattagatatagagaatatgatccgtaacatatacaacttttattatggcgtctaagatattcttccatcaacttattaacatttttgactagggaagatacattatgacgtcccattacttttgccttgtctattactgcgacgttcatagaatttagcatatctcttgccaattcttccattgatgttacattataagaaattttagatgaaattacatttggagctttaatagtaagaactcctaatatgtccgtgtatgtggtcactaatacagattgtagttctataatcgtaaataatttacctatattatatgtttgagtctgtttagaaaagtagctaagtatacgatcttttatttctgatgcagatgtatcaacatcggaaaaaaatctttttttattcttttttactaaagatacaaatatgtctttgttaaaaacagttattttctgaatatttctagcttgtaattttaacatatgatattcgttcacactaggtactctgcctaaataggtttctataatctttaatgtaatattaggaaaagtattctgatcaggattcctattcattttgaggatttaaaactctgattattgtctaatatggtctctacgcaaactttttcacagagcgatagagtttttgataactcgtttttcttaagaaatataaaactactgtctccagagctcgctctatcttttattttatttaattcgatacaaactcctgatactggttcagaaagtaattcattaattttcagtcctttatagaagatatttaatatagataatacaaaattttcagttcttgatatcgatctgattgatcctagaactagatatattaataacgtgctcattaggcagtttatggcagcttgataattagatatagtatattccagttcatatttattagataccgcattgcccagattttgatattctatgaattcctctgaaaataaatccaaaataactaaacattctattttttgtggattagtgtactctcttccctctatcatgttcactactggtgtccacgatgataaatatctagagggaatataatatagtccataggatgccaatctagcaatgtcgaataactgtaatttgattcttcgttcttcattatgaattgattcttgaggtataaacctaacacaaattatattattagacttttcgtatgtaatgtctttcatgttataagtttttaatcctggaatagaatctattttaatgaggcttttaaacgcagagttctccaacgagtcaaagcataatactctgttgtttttcttatatacgatgttacgattttcttctttgaatggaataggtttttgaattagtttataattacaacataatagataaggaagtgtgcaaatagtacgcggaaaaaacataatagctcccctgttttcatccatggttttaagtaaatgatcactggcttctttagtcaatggatattcgaacattaaccgtttcatcatcattggacagaatccatatttcttaatgtaaagagtgatcaaatcattgtgtttattgtaccatcttgttgtaaatgtgtattcggttatcggatctgctcctttttctattaaagtatcgatgtcgatctcgtctaagaattcaactatatcgacatatttcatttgtatacacataaccattactaacgtagaatgtataggaagagatgtaacgggaacagggtttgttgattcgcaaactattctaatacataattcttctgttaatacgtcttgcacgtaatctattatagatgccaagatatctatataattattttgtaagatgatgttaactatgtgatctatataagtagtgtaataattcatgtatttcgatatatgttccaactctgtctttgtgatgtctagtttcgtaatatctatagcatcctcaaaaaatatattcgcatatattcccaagtcttcagttctatcttctaaaaaatcttcaacgtatggaatataataatctattttacctcttctgatatcattaatgatatagtttttgacactatcttctgtcaattgattcttattcactatatctaagaaacggatagcgtccctaggacgaactactgccattaatatctctattatagcttctggacataattcatctattataccagaattaatgggaactattccgtatctatctaacatagttttaagaaagtcagaatctaagacctgatgttcatatattggttcatacatgaaatgatctctattgatgatagtgactatttcattctctgaaaattggtaactcattctatatatgctttccttgttgatgaaggatagaatatactcaatagaatttgtaccaacaaactgttctcttatgaatcgtatatcatcatctgaaataatcatgtaaggcatacatttaacaattagagacttgtctcctgttatcaatatactattcttgtgataatttatgtgtgaggcaaatttgtccacgttctttaattttgttatagtagatatcaaatccaatggagctacagttcttggcttaaacagatatagtttttctggaacgaattctacaacattattataaaggactttgggtagataagtgggatgaaatcctattttaattaatgcgatagccttgtcctcgtgcagatatccaaacgcttttgtgatagtatggcattcattgtctagaaacgctctacgaatatctgtgacagatatcatctttagagaatatactagtcgcgttaatagtactacaatttgtattttttaatctatctcaataaaaaaattaatatgtatgattcaatgtataactaaactactaactgttattgataactagaatcagaatctaatgatgacgtaaccaagaagtttatctactgccaatttagctgcattatttttagcatctcgtttagattttccatctgccttatcgaatactcttccgtcgatgtctacacaggcataaaatgtaggagagttactaggccccactgattcaatacgaaaagaccaatctctcctagtaatttggcagtactcattaataacggtgacagggttagcacctttccaatcaataatttttttagccggaataacatcatcaaaagacttatgatcctctctcattgatttttcgcgggatacatcatctattatggcgtcagccataacatcagcatccggcttatccgcctccgttgtcataaaccaacgaggaggaatatcgtcggagctgtacaccatagcactacgttgaagatcgtacagagctttattaacttctcgcttctccatattaagttgtctagttagttgtgcagcagtagctccttcgattccaatggttttaatagcctcacacacaatctctgcgttagaacgctcgtcgatatagattttagacatttttagagagaactaacgcaatcagtaataaaactaatttattttatcattttttttattcatcatcctctggtggttcgtcgtttctatcgaatgtagctctgattaacccgtcatctataggtgatgctggttctggagattctggaggagatggattattatctggaagaatctctgttatttccttgttttcatgtatcgattgcgttgtaacattaagattgcgaaatgctctaaatttgggaggcttaaagtgttgtttgcaatctctacacgcgtgtctaactagtggaggttcgtcagcggctctagtttgaatcatcatcggcgtagtattcctacttttacagttaggacacggtgtattgtatttctcgtcgagaacgttaaaataatcgttgtaactcacatcctttattttatctatattgtattctactcctttcttaatgcattttataccgaataagagatagcgaaggaattctttttcggtgccgctagtacccttaatcatatcacatagtgttttatattccaaatttgtggcaatagacggtttatttctatacgatagtttgtttctggaatcctttgagtattctataccaatattattctttgattcgaatttagtttcttcgatattagattttgtattacctatattcttgatgtagtactttgatgatttttccatggcccattctattaagtcttccaagttggcatcatccacatattgtgatagtaattctcggatatcagtagcggttaccgccattgatgtttgttcattggatgagtaactactaatgtatacattttccatttataacacttatgtattaactttgttcatttatattttttcattattatgttgatattaacaaaagtgaatatatatatgttaataattgtattgtggttatacggctacaattttataattagtgaaagtcagtgtccgatgatcaatgacgatagctttactctgaaaagaaagtatcaaatcgatagtgcggagtcaacaataaaaatggataagaagaggacaaagtttcagaatagagccaaaatggtaaaagaaataaatcagacaataagagcagcacaaactcattacgagacattgaaactaggatacataaaatttaagagaatgattaggactactactctagaagatatagcaccatctattccaaataatcagaaaacttataaactattctcggacatttcagccatcggcaaagcatcacggaatccaagtaagatggtatatgctctgctgctttacatgtttcccaatttgtttggagatgatcatagattcattcgttatagaatgcatccaatgagtaaaatcaaacacaagatcttctctcctttcaaacttaatcttattagaatattagtggaagaaagattctataataatgaatgcagatctaataaatggagaataattggaacacaagttgataaaatgttgatagctgaatctgataaatatacaatagatgcaaggtataacctaaaacccatgtatagaatcaagggaaaatctgaagaagataccctctttatcaaacagatggtagaacaatgtgtgacatcccaggaattggtggaaaaagtgttgaagatactgtttagagatttgttcaagagtggagaatacaaagcgtacagatacgatgatgatgtagaaaatggatttattggattggatacactaaaattaaacattgttcatgatatagttgaaccatgtatgcctgttcgtaggccagtggctaagatactgtgtaaagaaatggtaaataaatactttgagaatccgctacatattattggtaaaaatcttcaagagtgcattgactttgttagtgaataggcatttcatctttctccaatactaattcaaattgttaaattaataatggatagtataaatagttattagtgataaaatagtaaaaataattattagaataagagtgtagtatcatagataactctcttctataaaaatggattttattcgtagaaagtatcttatatacacagtagaaaataatatagattttttaaaggatgatacattaagtaaagtaaacaattttaccctcaatcatgtactagctctcaagtatctagttagcaattttcctcaacatgttattactaaggatgtattagctaataccaatttttttgttttcatacatatggtacgatgttgtaaagtgtacgaagcggttttacgacacgcatttgatgcacccacgttgtacgttaaagcattgactaagaattatttatcgtttagtaacacaatacaatcgtacaaggaaaccgtgcataaactaacacaagatgaaaaatttttagaggttgccaaatacatggacgaattaggagaacttataggcgtaaattatgacttagttcttaatccattatttcacggaggggaacccatcaaagatatggaaatcatttttttaaaactgtttaagaaaacagacttcaaagttgttaaaaaattaagtgttataagattacttatttgggcttacctaagcaagaaagatacaggcatagagtttgcggataatgatagacaagatatatatactctatttcaacaaactggtagaatcgtccatagcaatctaacagaaacgtttagagattatatctttcccggagataagactagctattgggtgtggttaaacgaaagtatagctaatgatgcggatattgttcttaatagacacgccattaccatgtatgataaaattcttagttatatatactctgagataaaacaaggacgcgttaataaaaacatgcttaagttagtttatatctttgagcctgaaaaagatatcagagaacttctgctagaaatcatatatgatattcctggagatatcctatctattattgatgcaaaaaacgacgattggaaaaaatattttattagtttttataaagctaattttattaacggtaatacatttattagtgatagaacgtttaacgaggacttattcagagttgttgttcaaatagatcccgaatatttcgataatgaacgaattatgtctttattctctacgagtgctgcggacattaaacgatttgatgagttagatattaataacagttatatatctaatataatttatgaggtgaacgatatcacattagatacaatggatgatatgaagaagtgtcaaatctttaacgaggatacgtcgtattatgttaaggaatacaatacatacctgtttttgcacgagtcggatcccatggtcatagagaacggaatactaaagaaactgtcatctataaaatccaagagtagacggctgaacttgtttagcaaaaacattttaaaatattatttagacggacaattggctcgtctaggtcttgtgttagatgattataaaggagacttgttagttaaaatgataaaccatcttaagtctgtggaggatgtatccgcattcgttcgattttctacagataaaaaccctagtattcttccatcgctaatcaaaactattttagctagttataatatttccatcatcgtcttatttcaaaggtttttaagagataatctatatcatgtagaagaattcttggataaaagcatccatctaaccaagacggataagaaatatatacttcaattgataagacacggtagatcatagaacagaccaaatatattattaataatttgtatatacatagatataattatcacatattaaaaattcacacatttttgataaatgggaactgctgcaacaattcagactcccaccaaattaatgaataaagaaaatgcagaaatgattttggaaaaaattgttgatcatatagttatgtatattagtgacgaatcaagtgattcagaaaataatcctgaatatattgattttcgtaacagatacgaagactatagatctctcattataaaaagtgatcacgagtttgtaaagctatgtaaaaatcatgcagagaaaagttctccagaaacgcaacaaatgattatcaaacacatatacgaacaatatcttattccagtatctgaagtactattaaaacctataatgtccatgggtgacataattacatataacggatgtaaagacaatgaatggatgctagaacaactctctaccctaaactttaacaatctccgcacatggaactcatgtagcataggcaatgtaacgcgtctgttttatacattttttagttatctgatgaaagataaactaaatatataagtataatcccattctaatactttaacctgatgtattagcatcttattagaatattaacctaactaaaagacataacataaaaactcattacatagttgataaaaagcggtaggatataaatattatggctgccaccgttccgcgttttgacgacgtgtacaaaaatgcacaaagaagaattctagatcaagaaacattttttagtagaggtctaagtagaccgttaatgaaaaacacatatctatttgataattacgcgtatggatggataccagaaactgcaatttggagtagtagatacgcaaacttagatgcaagtgactattatcccatttcgttgggattacttaaaaagttcgagtttctcatgtctctatataaaggtcctattccagtatacgaagaaaaagtaaatactgaattcattgctaatggatcgttctctggtagatacgtatcatatcttcgaaagttttctgctcttccaacaaacgagtttattagttttttgttactgacttccattccaatctataatatcttgttctggtttaaaaatactcagtttgatattactaaacacacattattcagatacgtctatacagataatgccaaacacctggcgttggctaggtatatgcatcaaacaggagactataagcctttgtttagtcgtctcaaagagaattatatatttaccggtcccgttccaataggtatcaaagatataaatcaccctaatcttagtagagcaagaagtccatccgattatgagacattagctaatattagtactatattgtactttaccaagtatgatccggtattaatgtttttattgttttacgtacctgggtattcaattactacaaaaattactccagccgtagaatatctaatggataaactgaatctaacaaagagcgacgtacaactgttgtaaattattttatgcttcgtaaaatgtaggttttgaaccaaacattctttcaaagaatgagatgcataaaactttattatccaatagattgactatttcggacgtcaatcgtttaaagtaaacttcgtaaaatattctttgatcactgccgagtttaaaacttctatcgataattgtttcatatgttttaatatttacaagttttttggtccatggtacattagccggacaaatatatgcaaaataatatcgttctccaagttctatagtttctggattatttttattatattcagtaaccaaatacatattagggttatctgcggatttataatttgagtgatgcattcgactcaacataaataattctagaggagacgatctactatcaaattcggatcgtaaatctgtttctaaagaacggagaatatctatacatacctgattagaattcatccgtccttcagacaacatctcagacagtctggtcttgtatgtcttaatcatattcttatgaaacttggaaacatctcttctagtttcactagtacctttattaattctctcaggtacagattttgaattcgacgatgccgagtatttcatcgttgtatatttcttcttcgattgcataatcagattcttatataccgcctcaaactctattttaaaattattaaacaatactctattattaatcagtcgttctaactcctttgctatttctatggacttatctacatcttgactgtctatctctgtaaacacggagtcggtatctccatacacgctacgaaaacgaaatctgtaatctataggcaacgatgttttcacaatcggattaatatctctatcgtccatataaaatggattacttaatggattggcaaaccgtaacataccgttagataactctgctccatttagtaccgattctagatacaagatcattctacgtcctatggatgtgcaactcttagccgaagcgtatgagtatagagcactatttctaaatcccatcagaccatatactgagttggctactatcttgtacgtatattgcatggaatcatagatggccttttcagttgaactggtagcctgttttaacatctttttatatctggctctctctgccaaaaatgttcttaatagtctaggaatggttccttctatcgatctatcgaaaattgctatttcagagatgaggttcggtagtctaggttcacaatgaaccgtaatatatctaggaggtggatatttctgaagcaagagctgattatttatttcttcttccaatctattggtactaacaacgacaccgactaatgtttccggagatagatttccaaagatacacacattaggatacagactgttataatcaaagattaatacattattactaaacattttttgttttggagcaaataccttaccgccttcataaggaaacttttgttttgtttctgatctaactaagatagttttagtttccaacaatagctttaacagtggacccttgatgactgtactcgctctatattcgaataccatggattgaggaagcacatatgttgacgcacccgcgtctgtttttgtttctactccataatactcccacaaatactgacacaaacaagcatcatgaatacagtatctagccatatctaaagctatgtttagattataatccttatacatctgagctaaatcaacgtcatcctttccgaaagataatttatatgtatcattaggtaaagtaggacataatagtacgactttaaatccattttcccaaatatctttacgaattactttacatataatatcctcatcaacagtcacataattacctgtggttaaaacctttgcaaatgcagcggctttgcctttcgcgtccgtagtatcgtcaccgatgaacgtcatttctctaactcctctatttaatactttacccatgcaactgaacgcgttcttggatatagaatccaatttgtacgaatccaatttttcagatttttgaatgaatgaatatagatcgaaaaatatagttccattattgttattaacgtgaaacgtagtattggccatgccgcctactcccttatgactagactgatttctctcataaatacagagatgtacagcttcctttttgtccggagatctaaagataatcttctctcctgttaataactctagacgattagtaatatatctcagatcaaagttatgtccgttaaaggtaacgacatagtcgaacgttagttccaacaattgtttagctattcgtaacaaaactatttcagaacataaaactagttctcgttcgtaatccatttccattagtgactgtatcctcaaacatcctctatcgacggcttcttgtatttcctgttccgttaacatctcttcattaatgagcgtaaacaataatcgtttaccacttaaatcgatataacagtaacttgtatgcgagattgggttaataaatacagaaggaaacttcttatcgaagtgacactctatatctagaaataagtacgatcttgggatatcgaatctaggtatttttttagcgaaacagttacgtggatcgtcacaatgataacatccattgttaatctttgtcaaatattgctcgtccaacgagtaacatccgtctggagatatcccgttagaaatataaaaccaactaatattgagaaattcatccatggtggcattttgtatgctgcgtttctttggctcttctatcaaccacatatctgcgacggagcattttctatctttaatatctagattataacttattgtctcgtcaatgtctatagttctcatctttcccaacggcctcgcattaaatggaggaggagacaatgactgatatatttcgtccgtcactacgtaataaaagtaatgaggaaatcgtataaatacggtctcaccatttcgacatctggatttcagatataaaaatctgttttcaccgtgactttcaaaccaattaatgcaccgaacatccatttatagaatttagaaatatattttcatttaaatgaatcccaaacattggggaagagccgtatggaccattatttttatagtactttcgcaagcgggtttagacggcaacatagaagcgtgtaaacgaaaactatatactatagttagcactcttccatgtcctgcatgtagacggcacgcgactatcgctatagaggacaataatgtcatgtctagcgatgatctgaattatatttattattttttcatcagattatttaacaatttggcatctgatcccaaatacgcgatcgatgtgacaaaggttaaccctttataaacttaacccattataaaacttatgattagtcacgactgaaataaccgcgtgattattttttggtataattctacacggcatggtttctgtgactatgaattcaacccccgttacattagtgaaatctttaacaaacagcaagggttcgtcaaagacataaaactcattgtttacaatcgaaatagaccccctatcacacttaaaataaaaaatatccttatcctttaccaccaaataaaattctgattggtcaatgtgaatgtattcacttaacagttccacaaatttatttattaactccgaggcacatacatcgtcggtattttttatggcaaactttactcttccagcatccgtttctaaaaaaatattaacgagttccatttatatcatccaatattattgaaatgacgttgatggacaaatgatacaaataagaaggtacggtacctttgtccaccatctcctccaattcatgctctattttgtcattaactttaatgtatgaaaacagtacgccacatgcttccatgacagtgtgtaacactttggatacaaaatgtttgacattagtataattgttcaagactgtcaatctataatagatagtagctataatatattctatgatggtattgaagaagatgacaaccttggcatattgatcatttaacacagacatggtatcaacagatagcttgaatgaaagagaatcagtaattggaataagcgtcttctcgatggagtgtccgtataccaacatgtctgatattttgatgtattccattaaattatttagttttttctttttattctcgttaaacagcatttctgtcaacggaccccaacatcgttgaccgattaagttttgattgatttttccgtgtaaggcgtatctagtcagatcgtatagcctatccaataatccatcgtctgtgtgtagatcacatcgtacactttttaattctctatagaagagcgacagacatctggagcaattacagacagcaatttctttattctctacagatgtaagatacttgaagacattcctatgatgatgcagaattttggataacacggtattgatggtatctgttaccataattcctttgatggctgatagtgtcagagcacaagatttccaatctttgacaatttttagcaccattatctttgttttgatatctatatcagacagcatggtgcgtctgacaacacaaggattaagacggaaagatgaaatgattctctcaacatcttcaatggataccttgctattttttctggcattatctatatgtgcgagaatatcctctagagaatcagtatcctttttgatgatagtggatctcaatgacatgggacgtctaaaccttcttattctatcaccagattgcatggtgatttgtcttctttcttttatcataatgtaatctctaaattcatcggcaaattgtctatatctaaaatcataatatgagatgtttacctctacaaatatctgttcgtccaatgttagagtatttacatcagttttgtattccaaattaaacatggcaacggatttaattttatattcctctattaagtcctcgtcgataataacagaatgtagataatcatttaatccatcgtacatggttggaagatgctcgttgacaaaatctttaattgtcttgatgaaggtgggactatatctaacatcttgattaataaaatttataacattgtccataggatactttgtaactagttttatacacatctcttcatcggtaagtttagacagaatatcgtgaacaggtggtatattatattcatcagatatacgaagaacaatgtccaaatctatattgtttaatatattatatagatgtagtgtagctcctacaggaatatctttaactaagtcaatgatttcatcaaccgttagatctattttaaagttaatcatataggcattgatttttaaaaggtatgtagccttgactacattctcattaattaaccattccaagtcactgtgtgtaagaagattatattctatcataagcttgactacatttggtcccgataccattaaagaattcttatgatataaggaaacagattttaggtactcatctactctacaagaattttggagagccttaacgatatcagtgacgtttattatttcaggaggaaaaaacctaacattgagaatatcggaattaatagcttccagatacagtgattttggcaatagtccgtgtaatccataatccagtaacacgagctggtgcttgctagacaccttttcaatgtttaatttttttgaaataagctttgataaagccttcctcgcaaattccggatacatgaacatgtcggcgacatgattaagtattgttttttcattatttttatattttctcaacaagttctcaataccccaatagatgatagaatatcacccaatgcgtccatgttgtctatttccaacaggtcgctatatccaccaatagaagttttcccaaaaaagattctaggaacagttctaccaccagtaatttgttcaaaatagtcacgcaattcattttcgggtttaaattctttaatatcgacaatttcatacgctcctcttttgaaactaaacttatttagaatatccagtgcatttctacaaaaaggacatgtatacttgacaaaaattgtcactttgttattggccaacctttgttgtacaaattcctcggccattttaatatttaagtgatataaaactatctcgacttatttaactctttagtcgagatatatggacgcagatagctatatgatagccaactacagaaggcaaacgctataaaaaacataattacgacgagcatatttataaatatttttattcagcattacttgatatagtaatattaggcacagtcaaacattcaaccactctcgatacattaactctctcattttctttaacaaattctgcaatatcttcgtaaaaagattcttgaaactttttagaatatctatcgactctagatgaaatagcgttcgtcaacatactatgttttgtatacataaaggcgcccattttaacagtttctagtgacaaaatgctagcgatcctaggatcctttagaatcacatagattgacgattcgtctctcttagtaactctagtaaaataatcatacaatctagtacgcgaaataatattatccttgacttgaggagatctaaacaatctagttttgagaacatcgataagttcatcgggaatgacatacatactatctttaatagaactcttttcatccagttgaatggattcgtccttaaccaactgattaatgagatcttctattttatcattttccagatgatatgtatgtccattaaagttaaattgtgtagcgcttctttttagtctagcagccaatactttaacatcactaatatcgatatacaaaggagatgatttatcgatggcattaagaattcgtttttcgacatctgtcaaaaccaattcctttttgcctgtatcatccagttttccatcctttgtaaagaaattattttctactagactattaataagactgataaggattcctccataattgcacaatccaaactttttcacaaaactagactttacaagatctacaggaatgcgtacttcaggtttcttagcttgtgattttttcttttgtggacattttcttgtgaccaactcatctaccatttcattgattttagcagtgaaataagctttcaatgcacgggcactgatactattgaaaacgagttgatcttcaaattccgccatttaagttcaccaaacaacttttaaatacaaatatatcaatagtagtagaataagaactataaaaaaaataataattaaccaataccaaccccaacaaccggtattattagttgatgtgactgttttctcatcacttagaacagatttaacaatttctataaagtctgtcaaatcatcttccggagaccccataaatacaccaaatatagcggcgtacaacttatccatttatacattgaatattggcttttctttatcgctatcttcatcatattcatcatcaatatcaacaagtcccagattacgagccagatcttcttctacattttcagtcattgatacacgttcactatctccagagagtccgataacgttagccaccacttctctatcaatgattagtttcttgagtgcgaatgtaatttttgtttccgttccggatctatagaaaactacaggtgtgataattgccttggccaattgtctttctcttttactgagtgattctagttcaccttctatagatctgagaatggatgattctccagtcgaaacatattctaccatggctccgtttaatttgttgatgaagatggattcatccttaaatgttttctctgtaatagtttccaccgaaagactatgcaaagaatttggaatgcgttccttgtgcttaatgtttccatagacggcttctagaagttgatacaacataggactagccgcggtaacttttatttttagaaagtatccatcgcttctatcttgtttagatttatttttataaagtttagtctctccttccaacataataaaagtggaagtcatttgactagataaactatcagtaagttttatagagatagacgaacaattagcgtattgagaagcatttagtgtaacgtattcgatacattttgcattagatttactaatcgattttgcatactctataacacccgcacaagtctgtagagaatcgctagatgcagtaggtcttggtgaagtttcaactctcttcttgattaccttactcatgattaaacctaaataattgtactttgtaatataatgatatatattttcactttatctcatttgagaataaaaatgtttttgtttaaccactgcatgatgtacagatttcggaatcgcaaaccaccggtggttttattttatccttgtccaatgtgaattgaatgggagcggatgcgggtttcgtacgtagatagtacattcccgtttttagaccgagactccatccgtaaaaatgcatactcgttagtttggaataactcggatctgctatatggatattcatagattgactttgatcgatgaaggctcccctgtctgcagccatttttatgatcgtcttttgtggaatttcccaaatagttttataaactcgcttaatatcttctggaaggtttgtattctgaatggatccaccatctgccataatcctattcttgatctcatcattccataattttctctcggttaaaactctaaggagatgcggattaactacttgaaattctccagacaatactctccgagtgtaaatattactggtatacggttccaccgactcattatttcccaaaatttgagcagttgatgcagtcggcataggtgccaccaataaactatttctaagaccgtatgttctgattttatcttttagaggttcccaattccaaagatccgacggtacaacattccaaagatcatattgtagaataccgttactggcgtacgatcctacatatgtatcgtatggtccttccttctcagctagttcacaactcgcctctaatgcaccgtaataaatggtttcgaagatcttcttatttagatcttgtgcttccaggctatcaaatggataatttaagagaataaacgcgtccgctaatccttgaacaccaataccgataggtctatgtctcttattagagatttcagcttctggaataggataataattaatatctataattttattgagatttctgacaattactttgaccacatccttcagtttgagaaaatcaaatcgcccatctattacaaacatgttcaaggcaacagatgccagattacaaacggctacctcattagcatccgcatattgtattatctcagtgcaaagattactacacttgatagttcctaaattttgttgattactctttttgttacacgcatccttataaagaatgaatggagtaccagtttcaatctgagattctataatcgctttccagacgactcgagcctttattatagatttgtatctcctttctctttcgtatagtgtatacaatcgttcgaactcgtctccccaaacattgtccaatccaggacattcatccggacacatcaacgaccactctccgtcatccttcactcgtttcataaagagatcaggaatccaaagagctataaatagatctctggttctatgttcctcgtttcctgtattctttttaagatcgaggaacgccataatatcagaatgccacggttccaagtatatggccataactccaggccgtttgtttcctccctgatctatgtatctagcggtgttattataaactctcaacattggaataataccgtttgatataccattggtaccggagatatagcttccactggcacgaatattactaattgatagacctattccccctgccattttagagattaatgcgcatcgttttaacgtgtcatagataccctctatgctatcatcgatcatgttaagtagaaaacagctagacatttggtgacgactagttcccgcattaaataaggtaggagaagcgtgcgtaaaccatttttcagaaagtagattgtacgtctcaatagctgagtctatatcccattgatgaattcctactgcgacacgcattaacatgtgctgaggtctttcaacgatcttgttgtttattttcaacaagtaggatttttccaaagttttaaaaccaaaatagttgtatgaaaagtctcgttcgtaaataataaccgagttgagtttatccttatatttgttaactatatccatggtgatacttgaaataatcggagaatgtttcccatttttaggattaacatagttgaataaatcctccatcacttcactaaatagtttttttgtttccttgtgtagatttgatacggctattctggcggctagaatggcataatccggatgttgtgtagtacaagtggctgctatttcggctgccagagtgtccaattctaccgttgttactccattatatattccttgaataaccttcatagctattttaataggatctatatgatccgtgtttaagccataacataattttctaatacgagacgtgattttatcaaacatgacattttccttgtatccatttcgtttaatgacaaacatttttgttggtgtaataaaaaaattatttaacttttcattaatagggatttgacgtacgtagcgtacaaaatgattgttcctggtatatagataaagagtcctatatatttgaaaatcgttacggctcgattaaactttaatgattgcatagtgaatatatcattaggatttaactccttgactatcagggcggcaccagaaattaccatcaaaagcattaatacagttatgcctatcgcagttagaacggttatagcatccaccatttatatctaaaaattagatcaaagaatatgtgacaaagtcctagttgtatattgagaattgacaaaacaatgtttcttacatattttttttttattagtaaccgacttaatagtaggaactggaaaactagacttgattattctataagtatagatacccttccaaataatattctctttgataaaagttccagaaaatgtagaattttttaaaaagttatcttttgctattaccaagattgtgtttagacgcttattattaatatgagtgatgaaatccacaccgcctctagatatcgcttttatttccacattagatggtaaatccaatagtgaaactatctttttaggaatgtatggactcgcgtttagaggagtgaacgtcttaggcgtcggaaaggatgattcatcaaacgaataaacaatttcacaaatggatgttaatgtattagtaggaaattttttgacgctagtggaattgaagattctaatggatgatgttctacctatttcatccgataacatgttaatttccgacaccaacggttttaatatttcgatgatatacggtagtctctctttcggacttatatagcttattccacaatacgagtcattatatactccaaaaaacaaaataactagtataaaatctgtatcgaatgggaaaaacgaaattatcgacataggtatagaatccggaacattgaacgtattaatacttaattctttttctgtggtaagtaccgataggttattgacattgtatggttttaaatattctataacttgagacttgatagatattagtgatgaattgaaaattatttttatcaccacgtgtgtttcaggatcatcgtcgacgcccgtcaaccaaccgaacggagtaaaataaatatcattaatatatgctctagatattagtatttttatcaatcctttgattatcatcttctcgtaggcgaatgattccatgatcaagagtgatttaagaacatcctccggagtattaatgggcttagtaaacagtccatcgttgcaataataaaagttatccaagttaaaggatattatgcattcgtttaaagatatcacctcatctgacggagacaattttttggtaggttttagagactttgaagctacttgtttaacaaagttattcatcgtcgtttactattctatttaattttgtagttaatttatcacatatcacattaattgactttttggtccatttttccatacgtttatattcttttaatcctgcgttatccgtttccgttatatccagtgatagatcgtgcaggttaaatagaatgctcttaaataatgtcatttttttatccgctaaaaatttaaagaatgtataaacttttttcaaagatttaaaacttttaggtggtgtcctagtacacaatatcataaacaaactaataaacatcccgcattcagattccaacagctgattaacttccacattaatacagcctattttcgctccaaatgtacattcgaaaaatctgaataaaacatcaatgtcgcaatttgtattatccaatacagaatgtttgtgattcgtgttaaaaccatcggagaaggaatagaaataaaaattattatagtggtggaattcagttggaatattgcctccggagtcataaaaggatactaaacattgttttttatcataaattacacatttccaatgagacaaataacaaaatccaaacattacaaatctagaggtagaacttttaattttgtctttaagtatatacgataagatatgtttattcataaacgcgtcaaatttttcatgaatcgctaaggagtttaagaatctcatgtcaaattgtcctatataatccacttcggatccataagcaaactgagagactaagttcttaatacttcgattgctcatccaggctcctctctcaggctctattttcatcttgacgacctttggattttcaccagtatgtattcctttacgtgataaatcatcgattttcaaatccatttgtgagaagtctatcgccttagatactttttcccgtagtcgaggtttaaagaaatacgctaacggtatactagtaggtaactcaaaaacatcatatatagaatggtaacgcgtctttaactcgtcggttaactctttcttttgatcgagttcgtcgctactattgggtctgctcaggtgccccgactctactagttccaacatcataccgataggaatacaagacactttgccggcggttgtagatttatcatatttttccactacatatccgttacaatttgttaaaaatttagatacatctatattgctacataatccagctagtgaatatatatgacataataaattggtaaatcctagttctggtattttactaattactaaatctgtatatctttccatttatcatggaaaagaatttaccagatatcttcttttttccaaactgcgttaatgtattctcttacaaatattcacaagatgaattcagtaatatgagtaaaacggaacgtgatagtttctcattggccgtgtttccagttataaaacatagatggcataacgcacacgttgtaaaacataaaggaatatacaaagttagtacagaagcacgtggaaaaaaagtatctcctccatcactaggaaaacccgcacacataaacctaaccgcgaagcaatatatatacagtgaacacacaataagctttgaatgttatagttttctaaaatgtataacaaatacagaaatcaattcgttcgatgagtatatattaagaggactattagaagctggtaatagtttacagatattttccaattccgtaggtaaacgaacagatactataggtgtactagggaataagtatccatttagcaaaattccattggcctcattaactcctaaagcacaacgagagatattttcagcgtggatttctcatagacctgtagttttaactggaggaactggagtgggtaagacgtcacaggtacccaagttattgctttggtttaattatttatttggtggattctctactctagataaaatcactgactttcacgaaagaccagtcattctatctcttcctaggatagctttagttagattgcatagcaataccattttaaaatcattgggatttaaggtactagatggatctcctatttctttacggtacggatctataccggaagaattaataaacaaacaaccaaaaaaatatggaattgtattttctacccataagttatctctaacaaaactatttagttatggcactcttattatagacgaagttcatgagcatgatcaaataggagatattattatagcagtagcgagaaagcatcatacgaaaatagattctatgtttttaatgactgccacgttagaggatgaccgagaacggctaaaagtatttttacctaatcccgcatttatacatattcctggagatacactgtttaaaattagcgaggtatttattcataataagataaatccatcttccagaatggcatacatagaagaagaaaagagaaatttagttactgctatacagatgtatactcctcctgatggatcatccggtatagtctttgtggcatccgttgcacagtgtcacgaatataaatcatatttagaaaaaagattaccgtatgatatgtatattattcatggtaaggtcttagatatagacgaaatattagaaaaagtgtattcatcacctaatgtatcgataattatttctactccttatttggaatccagcgttactatacgcaatgttacacacatttatgatatgggtaaagtttttgtccccgctccttttggaggatcgcaagaatttatttctaaatctatgagagatcaacgaaaaggaagagtaggaagagttaatcctggtacatacgtctatttctatgatctgtcttatatgaagtctatacagcgaatagattcagaatttctacataattatatattgtacgctaataagtttaatctaacactccccgaagatttgtttataatccctacaaatttggatattctatggcgtacaaaggaatatatagactcgttcgatattagtacagaaacatggaataaattattatccaattattatatgaagatgatagagtatgctaaactttatgtactaagtcctattctcgctgaggagttggataactttgagaggacgggagaattaactagtattgtacgagaagccattttatctctaaatttacgaattaagattttaaattttaaacataaagatgatgatacgtatatacacttttgtaaaatattattcggtgtctataacggaacaaacgctactatatattatcatagacctctaacgggatatatgaatatgatttcagatactatatttgttcctgtagataataactaaaaatcaaactctaatgaccacatctttttttagagatgaaaaattttctacatctccttttgtagacacgactaaacattttgcaaaaaaaagtttattagtgtttagataatcgtatacttcatcagtgtagatagtaaatgtgaacaaataaaaggtattcttactcaatagattggtaaattccatagaatatattaatcctttcttcttgagatcccacatcatttcaaccagagacgttttatccaatgatttacctcgtactataccacatacaaaactagattttgcagtgacgtcgtacctggtattcctaccaaacaaaattttacttttagttcttttagaaaattctaaggtagaatctctatttgccaatatgtcatctatggaattaccactagcaaaaaatgatagaaatatatattgatacatcgcagctggttttgatctactatactttaaaaacgaatcagattccataattgcctgtatatcatcagctgaaaaactatgttttacacgtattccttcggcatttctttttaatgatatatcttgtttagacaatgataaagttatcatgtccatgagagacgcgtctccgtatcgtataaatatttcattagatgttagacgcttcattaggggtatacttctataaggtttcttaatcagtccatcattggttgcgtcaagaactactatcggatgttgttgggtatctctagtgttacacatggccttactaaagtttgggtaaataactatgatatctctattaattatagatgcatatatttcattcgtcaaggatattagtatcgacttgctatcgtcattaatacgtgtaatgtaatcatataaatcatgcgatagccaaggaaaattcaaatagatgttcatcatataatcgtcgctataattcatattaatacgttgacattgactaatttgtaatatagcctcgccacgaagaaagctctcgtattcagtttcatcgataaaggataccgttaaatataactggttgccgatagtctcatagtctattaagtggtaagtttcgtacaaatacagaatccctaaaatattatctaatgttggattaatctttaccataactgtataaaatggagacggagtcataactattttaccgtttgtacttactggaatagacgaaggaataatctccggacatgctggtaaagacccaaatgtctgtttgaagaaatccaatgttccaggtcctaatctcttaacaaaaattacgatattcgatcccgatatcctttgcattctatttaccagcatatcacgaactatattaagattatctatcatgtctattctcccaccgttatataaatcgcctccgctaagaaacgttagtatatccatacaatggaatacttcatttctaaaatagtattcgttttctaattctttaatgtgaaatcgtatactagaaagggaaaaattatctttgagttttccgttagaaaagaaccacgaaactaatgttctgattgcgtccgattccgttgctgaattaatggatttacaccaaaaactcatataacttctagatgtagaagcattcgctaaaaaattagtagaatcaaaggatataagtagatgttccaacaagtgagcaattcccaagatttcatctatatcattctcgaatccgaaattagaaattcccaagtagatatcctttttcatccgatcgttgatgaaaatacgaactttattcggtaagacaatcatttactaaggagtaaaataggaagtaatgttcgtatgtcgttatcatcgtataaattaaaggtgtgttttttaccattaagtgacattataattttaccaatattggaattataatataggtgtatttgcgcactcgcgacggttgatgcatcggtaaatatagctgtatctaatgttctagtcggtatttcatcatttcgctgtctaataatagcgttttctctatctgtttccattacagctgcctgaagtttattggtcggataatatgtaaaataataagaaatacatacgaataacaaaaataaaataagatataataaagatgccatttagagatctaattttgttcaacttgtccaaattcctacttacagaagatgaggaatcgttggagatagtgtcttccttatgtagaggatttgaaatatcttatgatgacttgataacttactttccagataggaaataccataaatatatttctaaagtatttgaacatgtagatttatcggaggaattaagtatggaattccatgatacaactttgcgagatttagtctatcttagattgtacaagtattccaagtgtatacggccgtgttataaattaggagataatctaaaaggcatagttgttataaaggacaggaatatttatattagggaagcaaatgatgacttgatagaatatctcctcaaggaatacactcctcagatttatacatattctaatgagcgcgtccccataactggttcaaaattaattctttgtggattttctcaagttacatttatggcgtatacaacgtcgcatataacaacaaataaaaaggtagatgttctcgtttccaaaaaatgtatagatgaactagtcgatccaataaattatcaaatacttcaaaatttatttgataaaggaagcggaacaataaacaaaatactcaggaagatattttattcggtaacaggtggccaaactccataggtagctttttctatttcggattttagaatttccaaattcaccagcgatttatctgttttggtgaaatccaaggatttattaatgtccacaaatgccatttgttttgtctgtggattgtatttgaaaatggaaacgatgtagttagatagatgcgctgcgaagtttcctattagggttccgcgcttcacgtcacccagcatacttgaatcaccatcctttaaaaaaaatgataagatatcaacatggagtatatcatactcggattttaattcttctactgcatcactgacattttcacaaatactacaatacggtttaccgaaaataatcagtacgttcttcatttatgggtatcaaaaacttaaaatcgttactgctggaaaataaatcactgacgatattagatgataatttatacaaagtatacaatggaatatttgtggatacaatgagtatttatatagccgtcgccaattgtgtcagaaacttagaagagttaactacggtattcataaaatacgtaaacggatgggtaaaaaagggagggcatgtaaccctttttatcgatagaggaagtataaaaattaaacaagacgttagagacaagagacgtaaatattctaaattaaccaaggacagaaaaatgctagaattagaaaagtgtacatccgaaatacaaaatgttaccggatttatggaagaagaaataaaggcagaaatgcaattaaaaatcgataaactcacatttcaaatatatttatctgattctgataacataaaaatatcattgaatgagatactaacacatttcaacaataatgagaatgttacattattttattgtgatgaacgagacgcagaattcgttatgtgtctcgaggctaaaacacatttctctaccacaggagaatggccgttgataataagtaccgatcaggatactatgctatttgcatctgctgataatcatcctaagatgataaaaaacttaactcaactgtttaaatatgttccatctgcagaggataactatttagcaaaattaacggcgttagtgaatggatgtgatttctttcctggactctatggggcatctataacacccaacaacttaaacaaaatacaattgtttagtgattttacaatcgataatatagtcactagtttggcaattaaaaattattatagaaagactaactctaccgtagacgtgcgtaatattgttacgtttataaacgattacgctaatttagacgatgtctactcgtatattcctccttgtcaatgcactgttcaagaatttatattttccgcattagatgaaaaatggaatgaatttaaatcatcttatttagaaagcgtgccgttaccctgccaattaatgtatgcgttagaaccacgtaaggagattgatgtttcagaagttaaaactttatcatcttatatagatttcgaaaatactaaatcagatatcgatgttataaaatctatatcctcgatcttcggatattctaacgaaaactgtaacacgatagtattcggcatctataaggataatttactactgagtataaatagttcattttactttaacgatagtctgttaataaccaatactaaaagtgataatataataaatataggttactagattaaaaatggtgttccaactcgtgtgctctacgtgcggcaaagatatttctcacgaacgatataaattgattatacgaaaaaaatcattaaaggatgtactcgtcagtgtaaagaacgaatgttgtaggttaaaattatctacacaaatagaacctcaacgtaacttaacagtgcaacctctattggatataaactaatatggatccggttaattttatcaagacatatgcgcctagaggttctattatttttattaattataccatgtcattaacaagtcatttgaatccatcgatagaaaaacatgtgggtatttattatggtacgttattatcggaacacttggtagttgaatcaacatatagaaaaggagttcgaatagtcccattggatagtttttttgaaggatatcttagtgcaaaagtatacatgttagagaatattcaagttatgaaaatagcagctgatacgtcattaactttattgggtattccgtatggatttggtcatgatagaatgtattgttttaaattggtagctgactgttataaaaatgccggtattgatacatcgtctaaacgaatattaggtaaagatatttttctgagccaaaacttcacagacgataatagatggataaagatatatgattctaataatttaacattttggcaaattgattaccttaaagggtgagttaatatgcataactactcctccgttgttttttccctcgttctttttcttaacgttgtttgccatcactctcataatgtaaagatattctaaaatggtaaacttttgcatatcggacgcagaaattggtataaatgttgtaattgtattatttcccgtcaatggactagtcacagctccatcagttttatatcctttagagtatttctcactcgtgtctaacattctagagcattccatgatctgtttatcgttgatattggccggaaagatagattttttattttttattatattactattggcaattgtagatataacttctggtaaatatttttctaccttttcaatctcttctattttcaagccggctatatattctgctatattgttgctagtatcaataccttttctggctaagaagtcatatgtggtattcactatatcagttttaactggtagttccattagcctttccacttctgcagaataatcagaaattggttctttaccagaaaatccagctactataataggctcaccgatgatcattggcaaaatcctatattgtaccagattaatgagagcatatttcatttccaataattctgctagttcttgagacattgatttatttgatgaatctagttggttctctagatactctaccatttctgccgcatacaataacttgttagataaaatcagggttatcaaagtgtttagcgtggctagaatagtgggcttgcatgtattaaagaatgcggtagtatgagtaaaccgttttaacgaattatatagtctccagaaatctgtggcgttacatacatgagccgaatgacatcgaagattgtccaatatttttaatagctgctctttgtccattatttctatatttgactcgcaacaattgtagataccattaatcaccgattcctttttcgatgccggacaatagcacaattgtttagctttggactctatgtattcagaattaatagatatatctcttaatacagattgcactatacattttgaaactatgtcaaaaattgtagaacgacgctgttctgcagccatttaactttaaataatttacaaaaatttaaaatgagcatccgtataaaaatcgataaactgcgccaaattgtggcatatttttcagagttcagtgaagaagtatctataaatgtagactcgacggatgagttaatgtatatttttgccgccttgggcggatctgtaaacatttgggccattatacctctcagtgcatcagtgttctaccgcggagccgaaaatattgtgtttaatcttcctgtgtccaaggtaaaatcgtgtttgtgtagttttcacaatgatgccatcatagatatagaacctgatctggaaaataatctagtaaaactttctagttatcatgtagtaagtgtcgattgtaataaggaactgatgcctattaggacagatactactatttgtctaagtatagatcaaaagaaatcttacgtgtttaattttcacaagtatgaagaaaaatgttgtggtagaaccgtcattcatttagaatggttgttgggctttatcaagtgtattagtcagcatcagcatttggctattatgtttaaagatgacaatattattatgaagactcctggtaatactgatgcattttccagggaatattctatgactgaatgttctcaagaactacaaaagttttctttcaaaatagctatctcgtctctcaacaaactacgaggattcaaaaagagagtcaatgtttttgaaactagaatcgtaatggataatgacgataacattttaggaatgttgttttcggatagagttcaatcctttaagatcaacatctttatggcgtttttagattaatactttcaatgagataaatatgggtggcggagtaagtgttgagctccctaaacgggatccgcctccgggagtacccactaatgagatgttattaaacgtggataaaatgcatgacgtgatagctcccgctaagcttttagaatatgtgcatataggaccactagcaaaagataaagaggataaagtaaagaaaagatatccagagtttagattagtcaacacaggacccggtggtctttcggcattgttaagacaatcgtataatggaaccgcacccaattgctgtcgcacttttaatcgtactcattattggaaaaaggatggaaagatatcagataagtatgaagagggtgcagtattagaatcgtgttggccagacgttcacgacaccggaaaatgcgatgttgatttattcgactggtgtcagggggatacgttcgatagaaacatatgccatcagtggatcggttcagcctttaataggagtaatagaactgtagagggtcaacaatcgttaataaatctgtataataagatgcaaacattatgtagtaaagatgctagtgtaccaatatgtgaatcatttttgcatcatttacgcgcacacaatacagaagatagcaaagagatgatcgattatattctaagacaacagtctgcggactttaaacagaaatatatgagatgtagttatcccactagagataagttagaagagtcattaaaatatgcggaacctcgagaatgttgggatccagagtgttcgaatgccaatgttaatttcttgctaacacgtaattataataatttaggactttgcaatattgtacgatgtaatactagcgtgaacaacttacagatggataaaacttcctcattaagattgtcatgtggattaagcaatagtgatagattttctactgttcccgtcaatagagcaaaagtagttcaacataatattaaacactcgttcgacctaaaattgcatttgatcagtttattatctctcttggtaatatggatactaattgtagctatttaaatgggtgccgcggcaagcatacagacgacggtgaatacactcagcgaacgtatctcgtctaaattagaacaagaagcgaatgctagtgctcaaacaaaatgtgatatagaaatcggaaatttttatatccgacaaaaccatggatgtaacctcactgttaaaaatatgtgctctgcggacgcggatgctcagttggatgctgtgttatcagccgctacagaaacatatagtggattaacaccggaacaaaaagcatacgtgccagctatgtttactgctgcgttaaacattcagacgagtgtaaacactgttgttagagattttgaaaattatgtgaaacagacttgtaattctagcgcggtcgtcgataacaaattaaagatacaaaacgtaatcatagatgaatgttacggagccccaggatctccaacaaatttggaatttattaatacaggatctagcaaaggaaattgtgccattaaggcgttgatgcaattgacgactaaggccactactcaaatagcacctaaacaagttgctggtacaggagttcagttttatatgattgttatcggtgttataatattggcagcgttgtttatgtactatgccaagcgtatgttgttcacatccaccaatgataaaatcaaacttattttagccaataaggaaaacgtccattggactacttacatggacacattctttagaacttctccgatggttattgctaccacggatatgcaaaactgaaaatatattgataatattttaatagattaacatggaagttatcactgatcgtctagacgatatagtgaaacaaaatatagcggatgaaaaatttgtagattttgttatacacggtctagagcatcaatgtcctgctatacttcgaccattaattaggttgtttattgatatactattatttgttatagtaatttatatttttacggtacgtctagtaagtagaaattatcaaatgttgttggcgttggtggcgctagtcatcacattaactattttttattactttatactataatagtactagactgacttctaacaaacatctcacctgccataaataaatgcttgatattaaagtcttctatttctaacactattccatctgtggaaaataatactctgacattatcgctaattgacacatcggtgagtgatatgcctataaagtaataatcttctttgggcacatataccagtgtaccaggttctaacaacctatttactggtgctcctgtagcatactttttctttaccttgagaatatccatcgtttgcttggtcaatagcgatatgtgattttttatcaaccactcgaaaaagtaattggagtgttcatatcctctacgggctattgtctcatggccgtgtatgaaatttaagtaacacgactgtggtagatttgttctatagagccggttgccgcaaatagatagaactaccaatatgtctgtacaaatgttaaacattaattgattaacagaaaaaacaatgttcgttctgggaatagaaaccagatcaaaacaaaattcgttagaatatatgccacgtttatacatggaatataaaataactacagtttgaaaaataacagtatcatttaaacatttaacttgcggggttaatctcacaactttactgtttttgaactgttcaaaatatagcatagatccgtgagaaatacgtttagccgcctttaatagaggaaatcccaccgcctttctggatctcaccaacgacgatagttctgaccagcaactcatttcttcatcatccacctgttttaacatataataggcaggagatagatatccgtcattgcaatattccttctcgtaggcacacaatctaatattgataaaatctccattctcttctctgcatttattatcttgtttcggtggctgattaggctgtagtcttggtttaggctttggtatatcgttgttgaatctattttggtcattaaatctttcatttcttcctggtatatttttatcacctcgtttggttggatttttgtctatattatcgtttgtaacatcggtacgggtattcatttatcacaaaaaaaacttctctaaatgagtctactgctagaaaacctcatcgaagaagataccatattttttgcaggaagtatatctgagtatgatgatttacaaatggttattgccggcgcaaaatccaaatttccaagatctatgctttctatttttaatatagtacctagaacgatgtcaaaatatgagttggagttgattcataacgaaaatatcacaggagcaatgtttaccacaatgtataatataagaaacaatttgggtctaggagatgataaactaactattgaagccattgaaaactatttcttggatcctaacaatgaagttatgcctcttattattaataatacggatatgaccgccgtcattcctaaaaaaagtggtaggagaaagaataagaacatggttatcttccgtcaaggatcatcacctatcttgtgtattttcgaaactcgtaaaaagattaatatttataaagaaaatatggaatccgcgtcgactgagtatacacctatcggagacaacaaggctttgatatctaaatatgcgggaattaatgtcctgaatgtgtattctccttccacatccataagattgaatgccatttacggattcaccaataaaaataaactagagaaacttagtactaataaggaactagaatcgtatagttctagccctcttcaagaacccattaggttaaatgattttctgggactattggaatgtgttaaaaagaatattcctctaacagatattccgacaaaggattgattactataaatggagaatgttcctaatgtatactttaatcctgtgtttatagagcccacgtttaaacattctttattaagtgtttataaacacagattaatagttttatttgaagtattcgttgtattcattctaatatatgtattttttagatctgaattaaatatgttcttcatgcctaaacgaaaaatacccgatcctattgatagattacgacgtgctaatctagcgtgtgaagacgataaattaatgatctatggattaccatggatgacaactcaaacatctgcgttatcaataaatagtaaaccgatagtgtataaagattgtgcaaagcttttgcgatcaataaatggatcacaaccagtatctcttaacgatgttcttcgcagatgatgattcattttttaagtatttggctagtcaagatgatgaatcttcattatctgatatattgcaaatcactcaatatctagactttctgttattattattgatccaatcaaaaaataaattagaagccgtgggtcattgttatgaatctctttcagaggaatacagacaattgacaaaattcacagactttcaagattttaaaaaactgtttaacaaggtccctattgttacagatggaagggtcaaacttaataaaggatatttgttcgactttgtgattagtttgatgcgattcaaaaaagaatcctctctagctaccaccgcaatagatcctgttagatacatagatcctcgtcgcaatatcgcattttctaacgtgatggatatattaaagtcgaataaagtgaacaataattaattctttattgtcatcatgaacggcggacatattcagttgataatcggccccatgttttcaggtaaaagtacagaattaattagacgagttagacgttatcaaatagctcaatataaatgcgtgactataaaatattctaacgataatagatacggaacgggactatggacgcatgataagaataattttgaagcattggaagcaactaaactatgtgatgtcttggaatcaattacagatttctccgtgataggtatcgatgaaggacagttctttccagacattgttgaattctgtgagcgtatggcaaacgaaggaaaaatagttatagtagccgcactcgatgggacatttcaacgtaaaccgtttaataatattttgaatcttattccattatctgaaatggtggtaaaactaactgctgtgtgtatgaaatgctttaaggaggcttccttttctaaacgattgggtgaggaaaccgagatagaaataataggaggtaatgatatgtatcaatcggtgtgtagaaagtgttacatcgactcataatattatattttttatctaaaaaactaaaaataaacattgattaaattttaatataatacttaaaaatggatgttgtgtcgttagataaaccgtttatgtattttgaggaaattgataatgagttagattacgaaccagaaagtgcaaatgaggtcgcaaaaaaactgccgtatcaaggacagttaaaactattactaggagaattattttttcttagtaagttacagcgacacggtatattagatggtgccaccgtagtgtatataggatctgctcccggtacacatatacgttatttgagagatcatttctataatttaggagtgatcatcaaatggatgctaattgacggccgccatcatgatcctattttaaatggattgcgtgatgtgactctagtgactcggttcgttgatgaggaatatctacgatccatcaaaaaacaactgcatccttctaagattattttaatttctgatgtgagatccaaacgaggaggaaatgaacctagtacggcggatttactaagtaattacgctctacaaaatgtcatgattagtattttaaaccccgtggcgtctagtcttaaatggagatgcccgtttccagatcaatggatcaaggacttttatatcccacacggtaataaaatgttacaaccttttgctccttcatattcagctgaaatgagattattaagtatttataccggtgagaacatgagactgactcgagttaccaaatcagacgctgtaaattatgaaaaaaagatgtactaccttaataagatcgtccgtaacaaagtagttgttaactttgattatcctaatcaggaatatgactattttcacatgtactttatgctgaggaccgtgtactgcaataaaacatttcctactactaaagcaaaggtactatttctacaacaatctatatttcgtttcttaaatattccaacaacatcaactgaaaaagttagtcatgaaccaatacaacgtaaaatatctagcaaaaattctatgtctaaaaacagaaatagcaagagatccgtacgcagtaataaatagaaacgtactactgagatatactaccgatatagagtataatgatttagttactttaataaccgttagacataaaattgattctatgaaaactgtgtttcaggtatttaacgaatcatccataaattatactccggttgatgatgattatggagaaccaatcattataacatcgtatcttcaaaaaggtcataacaagtttcctgtaaattttctatacatagatgtggtaatatctgacttatttcctagctttgttagactagatactacagaaactaatatagttaatagtgtactacaaacaggcgatggtaaaaagactcttcgtcttcccaaaatgttagagacggaaatagttgtcaagattctctatcgccctaatataccattaaaaattgttagatttttccgcaataacatggtaactggagtagagatagccgatagatctgttatttcagtcgctgattaatcaattagtagagatgagataagaacattataataatcaataatatatcttatatctcgtttagaaaaatgctaatattaaaatagctaacgctagtaatccaatcggaagccatttgatatctataatagggtatctaatttcctgattcagatagcggacagctatattctcggtagctactcgtttggaatcacaaacattatttacatctaatttactatctgtaatggaaacgtttcccaatgaaatggtacaatccgatacattgcattttgttatatttttttttaaagaggctggtaacaacgcatcgcttcgtttacatggctcgtaccaacaataatagggtaatcttgtatctattcctatccgtactatgcttttatcaggataaatacatttacatcgtatatcgtctttgttagcatcacagaatgcataaatttgttcgtccgtcatgataaaaatttaaagtgtaaatataactattatttttatagttgtaataaaaagggaaatttgattgtataccttcggttctttaaaagaaactgacttgataaaaatggctgtaatctctaaggttacgtatagtctatatgatcaaaaagagattaatgctacagatattatcattagtcatgttaaaaatgacgacgatatcggtaccgttaaagatggtagactaggtgctatggatggggcattatgtaagacttgtgggaaaacggaattggaatgtttcggtcactggggtaaagtaagtatttataaaactcatatagttaagcctgaatttatttcagaaattattcgtttactgaatcatatatgtattcactgcggattattgcgttcacgagaaccgtattccgacgatattaacctaaaagagttatcgggacacgctcttaggagattaaaggataaaatattatccaagaaaaagtcatgttggaacagtgaatgtatgcaaccgtatcaaaaaattactttttcaaagaaaaaggtttgtttcgtcaacaagttggatgatattaacgttcctaattctctcatctatcaaaagttaatttctattcatgaaaagttttggccattattagaaattcatcaatatccagctaacttattttatacagactactttcccatccctccgttgattattagaccggctattagtttttggatagatagtatacccaaagaaaccaatgaattaacttacttattaggtatgatcgttaagaattgtaacttgaatgctgatgaacaggttatccagaaggcggtaatagaatacgatgatattaaaattatttctaataacacttccagtatcaatttatcatatattacatccggcaaaaataatatgattagaagttatatcgtcgcccgacgaaaagatcagacggctagatctgtaattggtcccagtacatctatcaccgttaatgaggtaggaatgcccgcatatattagaaatacacttacagaaaagatatttgttaatgcctttacagtggataaagttaaacaactattagcatcaaaccaagttaaattttactttaataaacgattaaaccaattaacaagaatacgccaaggaaagtttatcaaaaataaaatacatttattgcctggtgattgggtagaagtagctgttcaagaatatacaagtattatttttggaagacagccgtctctacatagatacaacgtcatcgcttcatctatcagagctaccgaaggagatactatcaaaatatctcccggaattgccaactctcaaaatgctgatttcgacggagatgaagaatggatgatattagaacaaaatcctaaagctgtaattgaacaaagtattcttatgtatccgacgacgttactcaaacacgatattcatggagcccccgtttatggatctattcaagatgaaatcgtagcagcgtattcattgtttaggatacaagatctttgtttagatgaagtattgaacatcttggggaaatatggaagagagttcgatcctaaaggtaaatgtaaattcagcggtaaagatatctatacttacttgataggtgaaaagattaattatccgggtctcttaaaggatggtgaaattattgcaaacgacgtagatagtaattttgttgtggctatgaggcatctgtcattggctggactcttatccgatcataagtcgaacgtggaaggtatcaactttattatcaagtcatcttatgtttttaagagatatctatctatttacggttttggggtgacattcaaagatctgagaccaaattcgacgttcactaataaattggaggccatcaacgtagaaaaaatagaacttatcaaagaagcatacgccaaatatctcaacgatgtaagagacgggaaaatagttccattatctaaagctttagaggcggactatgtggaatccatgttatccaacttgacaaatcttaatatccgagagatagaagaacatatgagacaaacgctgatagatgatccagataataacctcctgaaaatggccaaagcgggttataaagtaaatcctacagaactaatgtatattctaggtacgtatggacaacaaaggattgatggtgaaccagcagagactcgagtattgggtagagtcttaccttactatcttccagactctaaggatccagaaggaagaggttacattcttaattctttaacaaaaggattaacaggttctcaatattacttttcgatgctggttgcaagatctcaatctactgatatcgtctgtgaaacatcacgtaccggaacactggctagaaaaatcattaaaaagatggaggatatggtggtcgacggatacggacaagtagttataggtaatacgctcatcaagtacgccgccaattataccaaaattctaggctcagtatgtaaacctgtagatcttatctatccagatgagtccatgacttggtatttggaaattagtgctctgtggaataaaataaaacagggattcgtttactctcagaaacagaaacttgcaaagaagacattggcgccgtttaatttcctagtattcgtcaaacccaccactgaggataatgctattaaggttaaggatctgtacgatatgattcataacgtcattgatgatgtgagagagaaatacttctttacggtatctaatatagattttatggagtatatattcttgacgcatcttaatccttctagaattagaattacaaaagaaacggctatcactatctttgaaaagttctatgaaaaactcaattatactctaggtggtggaactcctattggaattatttctgcacaggtattgtctgagaagtttacacaacaagccctgtccagttttcacactactgaaaaaagtggtgccgtcaaacaaaaacttggtttcaacgagtttaataacttgactaatttgagtaagaataagaccgaaattatcactctggtatccgatgatatctctaaacttcaatctgttaagattaatttcgaatttgtatgtttgggagaattaaatccagacatcactcttcgaaaagaaacagataggtatgtagtagatataatagtcaatagattatacatcaagagagcagaaattaccgaattagtcgtcgaatatatgattgaacgattcatctcctttagcgtcattgtaaaggaatggggtatggaaacattcattgaggacgaggataatattagatttactgtctatctaaatttcgttgaaccagaggaattgaatcttagtaagtttatgatggttcttccgggtgccgccaacaagggcaagattagtaaattcaagattcctatctctgattatacgggttatgacgacttcaatcaaacaaaaaagctcaataagatgactgtagaactcatgaatctaaaagaattaggttctttcgatttggaaaacgtcaacgtgtatcctggagtatggaatacatacgatatcttcggtatcgaggccgctcgtgaatacttgtgcgaagccatgttaaacacctatggagaagggttcgattatctgtatcagccttgtgatcttctcgctagtttactatgtgctagttacgaaccagaatcagtgaataaattcaagttcggcgcagctagtactcttaagagagctacgttcggagacaataaagcattgttaaacgcggctcttcataaaaagtcagaacctattaacgataatagtagctgccacttttttagcaaggtccctaatataggaactggatattacaaatactttatcgacttgggtcttctcatgagaatggaaaggaaactatctgataagatatcttctcaaaagatcaaggagatggaagaaacagaagacttttaattcttatcaataacatatttttctatgatctgtcttttaaacgatggattttccacaaatgcgcctctcaagtccctcatagaatgatacacgtataaaaaatatagcataggcaatgactccttatttttagacattagatatgccaaaatcatagccccgcttctatttactcccgcagcacaatgaaccaacacgggctcgtttcgttgatcacatttagataaaaaggcggttacgtcgtcaaaatatttactaatatcggtagttgtatcatctaccaacggtatatgaataatattaatattagagttaggtaatgtatatttatccatcgtcaaatttaaaacatatttgaacttaacttcagatgatggtgcatccatagcatttttataatttcccaaatacacattattggttacccttgtcattatagtgggagatttggctctgtgcatatctccagttgaacgtagtagtaagtatttatacaaacttttcttatccatttataacgtacaaatggataaaactactttatcggtaaacgcgtgtaatttagaatacgttagagaaaaggctatagtaggcgtacaagcagccaaaacatcaacacttatattctttgttattatattggcaattagtgcgctattactctggtttcagacgtctgataatccagtctttaatgaattaacgagatatatgcgaattaaaaatacggttaacgattggaaatcattaacggatagcaaaacaaaattagaaagtgatagaggtagacttctagccgctggtaaggatgatatattcgaattcaaatgtgtggatttcggcgcctattttatagctatgcgattggataagaaaacatatctgccgcaagctattaggcgaggtactggagacgcgtggatggttaaaaaggcggcaaaggtcgatccatctgctcaacaattttgtcagtatttgataaaacacaagtctaataatgttattacttgtggtaatgagatgttaaatgaattaggttatagcggttattttatgtcaccgcattggtgttccgattttagtaatatggaatagtgttagataaatgcggtaacgaatgttcctgtaaggaaccataacagcttagatttaacgttaaagatgagcataaacataataaacaaaattacaatcaaacctataacattaatatcaaacaatccaaaaaatgaaatcagtggagtagtaaacgcgtacataactcctggataacgtttagtagctgccgttcctattctagaccaaaaattcggtttcatgttttcgaaacggtgttctgcaacaagtcggggatcgtgttctacatatttggcggcattatccagtatctgcctattgatcttcatttcgttttcaattctggctatttcaaaataaaatcccgatgatagacctccagactttataatttcatctacgatgttcagcgccgtagtaactctaataatataggctgataagctaacatcataccctcctgtatatgtgaatatggcatgatttttgtccattacaagctcggttttaactttattgcctgtaataatttctctcatctgtaggatatctatttttttgtcatgcattgccttcaagacgggacgaagaaacgtaatatcctcaataacgttatcgttttctacaataactacatattctacctttttattttctaactcggtaaaaaaattagaatcccatagggctaaatgtctagcgatatttcttttcgtttcctctgtacacatagtgttacaaaaccctgaaaagaagtgagtatacttgtcatcatttctaatgtttcctccagtccactgtataaacgcataatccttgtaatgatctggatcatccttgactaccacaacatttcttttttctggcataacttcgttgtcctttacatcatcgaacttctgatcattaatatgctcatgaacattaggaaatgtttctgatggaagtctatcaataactggcacaacaataacaggagttttcgccgccgccatttagttattgaaattaatcatatacaactctttaatacgagttatattttcgtctatccattgtttcacatttacatatttcgacaaaaagatataaaatgcgtattccaatgcttctctgtttaatgaattactaaaatatacaaacacgtcactgtctggcaataaatgatatcttagaatattgtaacaatttattttgtattgcacatgttcgtgatctatgagttcttcttcgaatggcataggatctccgaatctgaaaacgtataaataggagttagaataataatatttgagagtattggtaatatataaactctttagcggtataattagtttttttctctcaatttctatttttagatgtgatggaaaaatgactaattttgtagcattagtatcatgaactctaatcaaaatcttaatatcttcgtcacacgttagctctttgaagtttttaagagatgcatcagttggttctacagatggagtaggtgcaacaattttttgttctacacatgtatgtactggagccattgttttaactataatggtgcttgtatcgaaaaactttaatgcagatagcggaagctcttcgccgcgactttctacatcgtaattgggttctaacgccgatctctgaatggatactagttttctaagttctaatgtgattctctgaaaatgtaaatccaattcctccggcattatagatgtgtatacatcggtaaataaaactatagtatccaacgatcccttctcgcaaattctagtcttaaccaaaaaatcgtatataaccacggagatggcgtatttaagagtggattcttctaccgttttgttcttggatgtcatataggaaactataaagtccgcactactgttaagaatgattactaacgcaactatatagttcaaattaagcattttggaaacataaaataactctgtagacgatacttgactttcgaataagtttgcagacaaacgaagaaagaacagacctctcttaatttcagaagaaaactttttttcgtattcctgacgtctagagtttatatcaataagaaagttaagaattagtcggttaatgttgtatttcattacccaagtttgagatttcataatattatcaaaagacatgataatattaaagataaagcgctgactatgaacgaaatagctatatggttcgctcaaaaatatagtcttgttaaacgtggaaacgataactgtatttttaatcacgtcagcggcatctaaattaaatataggtatatttattccacacactctacaatatgccacaccatcttcataataaataaattcgttagcaaaattattaattttagtgaaatagttagcgtcaactttcatagcttccttcaatctaatttgatgctcacacggtgcgaattccactctaacatcccttttccatgcctcaggttcatcgatctctataatatctagttttttgcgtttcacaaacacaggctcgtctctcgcgatgagatctgtatagtaactatgtaaatgataactagatagaaagatgtagctatatagatgacgatcctttaagagaggtataataactttaccccaatcagatagactgttgttatggtcttcggaaaaagaatttttataaatttttccagtattttccaaatatacgtacttaacatctaaaaaatccttaatgataataggaatggataatccgtctattttataaagaaatacatatcgcacattatacttttttttggaaatgggaataccgatgtgtctacataaatatgcaaagtctaaatattttttagagaatcttaattggtccaaattcttttccaagtacggtaatagatttttcatattgaacggtatcttcttaatctctggttctagttccgcattaaatgatgaaactaagtcactatttttataactaacgattacatcacctctaacatcatcatttaccagaatactgatcttcttttgtcgtaaatacatgtctaatgtgttaaaaaaaagatcatacaagttatacgtcatttcatctgtggtattcttgtcattgaaggataaactcgtactaatctcttctttaacagcctgttcaaatttatatcctatatacgaaaaaatagcaaccagtgtttgatcatccgcgtcaatattctgttctatcgtagtgtataacaatcgtatatcttcttctgtgatagtcgatacgttataaaggttgataacgaaaatatttttatttcgtgaaataaagtcatcgtaggattttggacttatattcgcgtctagtagatatgcttttatttttggaatgatctcaattagaatagtctctttagagtccatttaaagttacaaacaactaggaaattggtttatgatgtataatttttttagtttttatagattctttattctatacttaaaaaatgaaaataaatacaaaggttcttgagggttgtgttaaattgaaagcgagaaataatcataaattatttcattatcgcgatatccgttaagtttgtatcgtaatggcgtggtcaattacaaataaagcggatactagtagcttcacaaagatggctgaaatcagagctcatctaaaaaatagcgctgaaaataaagataaaaacgaggatattttcccggaagatgtaataattccatctactaagcccaaaaccaaacgagccactactcctcgtaaaccagcggctactaaaagatcaaccaaaaaggaggaagtggaagaagaagtagttatagaggaatatcatcaaacaactgaaaaaaattctccatctcctggagtcagcgacattgtagaaagcgtggccgctgtagagctcgatgatagcgacggggatgatgaacctatggtacaagttgaagctggtaaagtaaatcatagtgctagaagcgatctttctgacctaaaggtggctaccgacaatatcgttaaagatcttaagaaaattattactagaatctctgcagtatcgacggttctagaggatgttcaagcagctggtatctctagacaatttacttctatgactaaagctattacaacactatctgatctagtcaccgagggaaaatctaaagttgttcgtaaaaaagttaaaacttgtaagaagtaaatgcgtgcacttttttataaagatggtaaactctttaccgataataattttttaaatcctgtatcagacgataatccagcgtatgaggttttgcaacatgttaaaattcctactcatttaacagatgtagtagtatatgaacaaacgtgggaggaggcgttaactagattaatttttgtgggaagtgattcaaaaggacgtagacaatacttttacggaaaaatgcatgtacagaatcgcaacgctaaaagagatcgtatttttgttagagtatataacgttatgaaacgaattaattgttttataaacaaaaatataaagaaatcgtccacagattccaattatcagttggcggtttttatgttaatggaaactatgttttttattagatttggtaaaatgaaatatcttaaggagaatgaaacagtagggttattaacactaaaaaataaacacatagaaataagtcccgatgaaatagttatcaagtttgtaggaaaggacaaagtttcacatgaatttgttgttcataagtctaatagactatataagccgctattgaaactgacggatgattctagtcccgaagaatttctgttcaacaaactaagtgaacgaaaggtatacgaatgtatcaaacagtttggtattagaatcaaggatctccgaacgtatggagtcaattatacgtttttatataatttttggacaaatgtaaagtccatatctcctcttccatcaccaaaaaagttaatagcgttaactatcaaacaaactgctgaagtggtaggtcatactccatcaatttcaaaaagagcttatatggcaacgactattttagaaatggtaaaggataaaaattttttagatgtagtatctaaaactacgttcgatgaattcctatctatagtcgtagatcacgttaaatcatctacggatggatgatatagatctttacacaaataattacaaaaccgataaatggaaatggataagcgtatgaaatctctcgcaatgaccgctttctttggggagctaagcacattagatattatggcattgataatgtctatatttaaacgccatccaaacaataccattttttcagtggataaggatggtcagtttatgattgatttcgaatacgataattataaggcttctcaatatttggatctgaccctcactccgatatctggagatgaatgcaagactcacgcatcgagtatagccgaacaattggcgtgtgtggatattattaaagaggatattagcgaatatatcaaaactactccccgtcttaaacgatttataaaaaaataccgcaatagatcagatactcgcatcagtcgagatacagaaaagcttaaaatagctctagctaaaggcatagattacgaatatataaaagacgcttgttaataagtaaatgaaaaaaaactagtcgtttataataaaacacgatatggatgccaacgtagtatcatcttctactattgcgacgtatatagacgctttagcgaagaatgcttcggaattagaacagaggtctaccgcatacgaaataaataatgaattggaactagtatttattaagccgccattgattactttgacaaatgtagtgaatatctctacgattcaggaatcgtttattcgatttaccgttactaataaggaaggtgttaaaattagaactaagattccattatctaaggtacatggtctagatgtaaaaaatgtacagttagtagatgctatagataacatagtttgggaaaagaaatcattagtgacggaaaatcgtcttcacaaagaatgcttgttgagactatcgacagaggaacgtcatatatttttggattacaagaaatatggatcctctatccgactagaattagtcaatcttattcaagcaaaaacaaaaaactttacgatagactttaagctaaaatattttctaggatccggtgcccagtctaaaagttctttattacacgctattaatcatccaaagtcaaggcctaatacatctctggaaatagaatttacacctagagacaatgaaacagttccatatgatgaactaataaaggaattgacgactctctcgcgtcatatatttatggcttctccagagaatgtaattctttctccgcctattaacgcgcctataaaaacctttatgttgcctaaacaagatatagtaggtttggatctggaaaatctatatgccgtaactaagactgacggcattcctataactatcagagttacatcaaacgggttgtattgttattttacacatcttggttatattattagatatcctgttaagagaataatagattccgaagtagtagtctttggtgaggcagttaaggataagaactggaccgtatatctcattaagctaatagagcctgtgaatgcaatcaatgatagactagaagaaagtaagtatgttgaatctaaactagtggatatttgtgatcggatagtattcaagtcaaagaaatacgaaggtccgtttactacaactagtgaagtcgtcgatatgttatctacatatttaccaaagcaaccagaaggtgttattctgttctattcaaagggacctaaatctaacattgattttaaaattaaaaaggaaaatactatagaccaaactgcaaatgtagtatttaggtacatgtccagtgaaccaattatctttggagagtcgtctatctttgtagagtataagaaatttagcaacgataaaggctttcctaaagaatatggttctggtaagattgtgttatataacggcgttaattatctaaataatatctattgtttggaatatattaatacacataatgaagtgggtattaagtccgtggttgtacctattaagtttatagcagaattcttagttaatggagaaatacttaaacctagaattgataaaaccatgaaatatattaactcagaagattattatggaaatcaacataatatcatagtcgaacatttaagagatcaaagcatcaaaataggagatatctttaacgaggataaactatcggatgtgggacatcaatacgccaataatgataaatttagattaaatccagaagttagttattttacgaataaacgaactagaggaccgttgggaattttatcaaactacgtcaagactcttcttatttctatgtattgttccaaaacatttttagacgattccaacaaacgaaaggtattggcgattgattttggaaacggtgctgacctggaaaaatacttttatggagagattgcgttattggtagcgacggatccggatgctgatgctatagctagaggaaatgaaagatacaacaaattaaactctggaattaaaaccaagtactacaaatttgactacattcaggaaactattcgatccgatacatttgtctctagtgtcagagaagtattctattttggaaagtttaatatcatcgactggcagtttgctatccattattcttttcatccgagacattatgctaccgtcatgaataacttatccgaactaactgcttctggaggcaaggtattaatcactaccatggacggagacaaattatcaaaattaacagataaaaagacttttataattcataagaatttacctagtagcgaaaactatatgtctgtagaaaaaatagctgatgatagaatagtggtatataatccatcaacaatgtctactccaatgactgaatacattatcaaaaagaacgatatagtcagagtgtttaacgaatacggatttgttcttgtagataacgttgatttcgctacaattatagaacgaagtaaaaagtttattaatggcgcatctacaatggaagatagaccatctacaagaaactttttcgaactaaatagaggagccattaaatgtgaaggtttagatgtcgaagacttacttagttactatgttgtttatgtcttttctaagcggtaaataataatatggtatgggttctgatatccccgttctaaatgcattaaataattccaatagagcgatttttgttcctataggaccttccaactgtggatactctgtattgttaatagatatattaatacttttgtcgggtaacagaggttctacgtcttttaaaaataaaagtttgataacatctggcctgttcataaataaaaacttggcgattctatatatactcttattatcaaatctagccattgtcttatagatgtgagctactgtaggtgtaccatttgattttctttctaatactatatatttctctcgaagaagttcttgcacatcatctgggaataaaatactactgttgagtaaatcagttattttttttatatcgatattgatggacatttttatagttaaggataataagtatcccaaagtcgataacgacgataacgaagtatttatacttttaggaaatcacaatgactttatcagattaaaattaacaaaattaaaggagcatgtatttttttctgaatatattgtgactccagatacatatggatctttatgcgtcgaattaaatgggtctagttttcagcacggcggtagatatatagaggtggaggaatttatagatgctggaagacaagttagatggtgttctacatccaatcatatatctaaagatatacccgaagatatgcacactgataaatttgtcatttatgatatatacacttttgacgctttcaagaataaacgattggtattcgtacaggtacctccgtcgttaggagatgatagtcatttgactaatccgttattgtctccgtattatcgtaattcagtagccagacaaatggtcaatgatatgatttttaatcaagattcatttttaaaatatttattagaacatctgattagaagccactatagagtttctaaacatataacaatagttagatacaaggataccgaagaattaaatctaacgagaatatgttataatagagataagtttaaggcgtttgtattcgcttggtttaacggcgtttcggaaaatgaaaaggtactagatacgtataaaaaggtatctaatttgatataatgaattcagtgactgtatcacacgcaccatatactattacttatcataatgattgggaaccagttatgagtcaattggtagagttttataacgaagtagccagttggctgctacgagacgagacgtcgcctattcctgataagttctttatacagttgaaacaaccgcttagaaataaacgagtatgtgtgtgcggtatagatccgtatccgaaagatggaactggtgtaccgttcgaatcaccaaattttacaaaaaaatcaattaaggagatagcttcatctatatctagattaaccggagtaattgattataaaggttataaccttaatataatagacggggttataccctggaattattacttaagttgtaaattaggagaaacaaaaagtcacgcgatctactgggataagatttccaagttactgctgcagcatataactaaacacgttagtgttctttattgtttgggtaaaacagatttctcgaatatacgggccaagttagaatccccggtaactaccatagtcggatatcatccagcggctagagaccgccaattcgagaaagatagatcatttgaaattatcaacgttttactggaattagacaacaaggcacctataaattgggctcaagggtttatttattaatgctttagtgaaattttaacttgtgttctaaatggatgcaactattagaggtaatgatgttatctttgttcttaagactataggtgtcccgtcagcgtgcagacaaaatgaagatccaagatttgtagaagcatttaaatgcgacgagttagaaagatatattgagaataatccagaatgtacactattcgaaagtcttagggatgaggaagcatactctatagtcagaattttcatggatgtagatttagacgcgtgtctagacgaaatagattatttaacggctattcaagattttattatcgaggtgtcaaactgtgtagctagattcgcgtttacagaatgcggcgccattcatgaaaatgtaataaaatccatgagatctaatttttcattgactaagtctacaaatagagataaaacaagttttcatattatctttttagacacgtataccactatggatacattgatagctatgaaacgaacactattagaattaagtagatcatctgaaaatccactaaccagatcgatagacactgccgtatataggagaaaaacaactcttcgggttgtaggtactaggaaaaatccaaattgcgacactattcatgtaatgcaaccaccgcatgataatatagaagattacctattcacttacgtggatatgaacaacaatagttattacttttctctacaacaacgattggaggatttagttcctgataagttatgggaaccagggtttatttcattcgaagacgctataaaaagagtttcaaaaatattcattaattctataataaactttaatgatctcgatgaaaataattttacaacggtaccactggtcatagattacgtaacaccttgtgcattatgtaaaaaacgatcgcataaacatccgcatcaactatcgttggaaaatggtgctattagaatttacaaaactggtaatccacatagttgtaaagttaaaattgttccgttggatggtaataaactgtttaatattgcacaaagaattttagacactaactctgttttattaaccgaacgaggagaccatatagtttggattaataattcatggaaatttaacagcgaagaacccttgataacaaaactaattttgtcaataagacatcaactacctaaggaatattcaagcgaattactctgtccaagaaaacgaaagactgtagaagctaacatacgagacatgttagtagattcagtagagaccgatacctatccggataaacttccgtttaaaaatggtgtattggacctggtagacggaatgttttactctggagatgatgctaaaaaatatacgtgtactgtatcaaccggatttaaatttgacgatacaaagttcgtcgaagacagtccagaaatggaagagttaatgaatatcattaacgatatccaaccattaacggatgaaaataagaaaaatagagagctatatgaaaaaacattatctagttgtttatgcggtgctaccaaaggatgtttaacattcttttttggagaaactgcaactggaaagtcgacaaccaaacgtttgttaaagtctgctatcggtgacctgtttgttgagacgggtcaaacaattttaacagatgtattggataaaggacctaatccatttatcgctaacatgcatttgaaaagatctgtattctgtagcgaactacctgattttgcctgtagtggatcaaagaaaatcagatctgataatattaaaaagttgacagaaccttgtgtcattggaagaccgtgtttctccaataaaattaataatagaaaccatgcgacaatcattatcgatactaattacaaacctgtttttgataggatagataacgcattaatgagaagaattgccgtcgtgcgattcagaacacacttttctcaaccttctggtagagaggctgctgaaaataatgacgcgtacgataaagtcaaactattagacgaggggttagatggtaaaatacaaaataatagatatagattcgcatttctatacttgttggtgaaatggtacagaaaatatcatgttcctattatgaaactatatcctacaccggaagagattccggactttgcattctatctcaaaataggtactctgttggtatctagctctgtaaagcatattccattaatgacggacctctccaaaaagggatatatattgtacgataatgtggttactcttccgttgactactttccaacagaaaatatccaagtattttaattctagactatttggacacgatatagagagcttcatcaatagacataagaaatttgccaatgttagtgatgaatatctgcaatatatattcatagaggatatttcatctccgtaaatatatgctcatatatttatagaagatatcacatatctaaatgaataccggaatcatagatttatttgataatcatgttgatagtataccaactatattacctcatcagttagctactctagattatctagttagaactatcatagatgagaacagaagcgtgttattgttccatattatgggatcaggtaaaacaataatcgctttgttgttcgccttggtagcttccagatttaaaaaggtttacattctagtgcctaatatcaacattttgaaaatttttaattataatatgggtgtagctatgaacttgtttaatgacgaattcatagctgagaatatctttattcattccacaacaagtttttattctcttaattataacgataacgtcattaattataacggattatctcgctacaataactctatttttatcgttgatgaggcacataatatctttgggaataatactggagaacttatgaccgtgataaaaaataaaaacaagattccttttctactattgtctggatctcccattactaacacacctaatactctgggtcatattatagatttaatgtccgaagagacgatagattttggtgagattattagtcgtggtaagaaagtaattcagacacttcttaacgaacgcggtgtgaatgtacttaaggatttgcttaaaggaagaatatcatattacgaaatgcctgataaagatctaccaacgataagatatcacggacgtaagtttctagatactagagtagtatattgtcacatgtctaaacttcaagagagagattatatgattactagacgacagctatgttatcatgaaatgtttgataaaaatatgtataacgtgtcaatggcagtattgggacaacttaatctgatgaataatttagatactttatttcaggaacaggataaggaattgtacccaaatctgaaaataaataatggcgtgttatacggagaagaattggtaacgttaaacattagttccaaatttaaatactttattaatcggatacagacactcaacggaaaacattttatatacttttctaattctacatatggtggattggtaattaaatatatcatgctcagtaatggatattctgaatataatggttctcagggaactaatccacatatgataaacggcaaaccaaaaacatttgctatcgttactagtaaaatgaaatcgtctttagaggatctattagatgtgtataattctcctgaaaacgatgatggtagtcaattgatgtttttgttttcatcaaacattatgtccgaatcctatactctgaaagaggtaaggcatatttggtttatgactatcccagatactttttctcaatacaaccaaattcttggacgatctattagaaaattctcttacgccgatatttctgaaccagttaatgtatatcttttagccgccgtatattccgatttcaatgacgaagtaacgtcattaaacgattacacacaggatgaattgattaatgttttaccatttgacatcaaaaagctgttatatctaaaatttaagactaaagaaacgaatagaatatactctattcttcaagagatgtctgaaacgtattctcttccaccacatccatcaattgtaaaagttttattgggagaattggtcagacaatttttttataataattctcgtattaagtataacgactccaagttacttaaaatggttacatcagttataaaaaataaagaagacgctaggaattacatagatgatattgtaaacggtcacttctttgtatcgaataaagtatttgataaatctcttttatacaaatacgaaaacgatattattacagtaccgtttagactttcctacgaaccatttgtttggggagttaactttcgtaaagaatataacgtggtatcttctccataaaactgatgaaatatataaagaaataaatgtcgagctttgttaccaatggataccttccagttacattggaaccacacgagctgacgttagacataaaaactaatattaggaatgccgtatataagacgtatctccatagagaaattagtggtaaaatggccaagaaaatagaaattcgtgaagacgtggaattacctctcggcgaaatagttaataattctgtagttataaacgttccgtgtgtaataacctacgcgtattatcacgttggggatatagtcagaggaacattaaacatcgaagatgaatcaaatgtaactattcaatgtggagatttaatctgtaaactaagtagagattcgggtactgtatcatttagcgattcaaagtactgcttttttcgaaatggtaatgcgtatgacaatggcagcgaagtcactgccgttctaatggaggctcaacaaggtatcgaatctagttttgtttttctcgcgaatatcgtcgactcataaaaaagagaatagcggtaagtataaacacgaatactatggcaataattgcgaatgttttattctcttcgatatatttttgataatatgaaaaacatgtctctctcaaatcggacaaccatctcataaaatagttctcgcgcgctggagaggtagttgctgctcgtataatctccccagaataatatacttgcgtgtcgtcgttcaatttatacggatttctatagttctctgttatataatgcggttttccatcatgattagacgacgacaatagtgttctgaatttagatagttgatcagaatgaatgtttattggcgttggaaaaattatccatacagcgtctgcagagtggttgatagttgttcctagatatgtaaaataatccaacttactaggcagcaaattgtctagataaaatactgaatcaaacggtgcagacgtattggcggatctaatggaatccaattgattaactatcttttgaaaatatacatttttatgatccaatacttgtaagaatatagaaataatgataagtccatcatcgtgtttttttgcctcttcataagaactatattttttcttattccaatgaacaagattaatctctccagagtatttgtacacatctatcaagtgattggatccataatcgtcttcctttccccaatatatatgtagtgatgataacacatattcattggggagaaaccctccacttatatatcctcctttaaaattaatccttactagttttccagtgttctggatagtggttggtttcgactcattataatgtatgtctaacggcttcaatcgcgcgttagaaattgcttttttagtttctatattaataggagatagttgttgcggcatagtaaaaatgaaatgataactgtttaaaaatagctcttagtatgggaattacaatggatgaggaagtgatatttgaaactcctagagaattaatatctattaaacgaataaaagatattccaagatcaaaagacacgcatgtgtttgctgcgtgtataacaagtgacggatatccgttaataggagctagaagaacttcattcgcgttccaggcgatattatctcaacaaaattcagattctatctttagagtatccactaaactattacggtttatgtactacaatgaactaagagaaatctttagacggttgagaaaaggttctatcaacaatatcgatcctcacttcgaagagttaatattattgggtggtaaactagataaaaaggaatctattaaagattgtttaagaagagaattaaaagaggaaagtgatgaacgtataacagtaaaagaattcggaaatgtaattctaaaacttacaacgcgcgataaattatttaataaagtatatataggttattgcatggcgtgttttattaatcaatcgttggaggatttatcgcatactagtatttacaatgtagaaattagaaagattaaatcattaaatgattgtattaacgacgataaatacgaatatctgtcttatatttataatatgctagttaatagtaaatgaacttttacagatctagtataattagtcagattattaagtataatagacgactagctaagtctattatttgcgaggatgactctcaaattatcacactcacggcattcgttaaccaatgcctatggtgtcataaacgagtatccgtgtccgctattttattaactactgataacaaaatattagtatgtaacagacgagatagttttctctattctgaaataattagaactagaaacatgtttagaaagaaacgattatttctgaattattccaattatttgaacaaacaggaaagaagtatactatcgtcatttttttctctagatccagctactactgataatgatagaatagacgctatttatccgggtggcatacccaaaaggggtgagaatgttccagagtgtttatccagggaaattaaagaagaagttaatatagacaattcttttgtattcatagacactcggttttttattcatggcatcatagaagataccattattaataaattttttgaggtaatcttctttgtcggaagaatatctctaacgagtgatcaaatcattgatacatttaaaagtaatcatgaaatcaaggatctaatatttttagatccgaattcaggtaatggactccaatacgaaattgcaaaatatgctctagatactgcaaaactcaaatgttatggccatagaggatgttattacgaatcattaaaaaaattaactgaggatgattgattagaaaatataaattaatttaccatcgtgtatttttataacgggattgtccggcatatcatgtagatagttaccgtctacatcgtatactcgaccatctacgcctttaaatcctctatttattgacattaatctattagaattggaataccaaatattagtaccctcaattagtttattggtaatatttttgttagacgatagatcgatggctcttgaaaccaaggttttccaaccggactcattgtcgatcggtgagaagtctttttcattagcatgaatccattctaatgatgtatgtttaaacactctaaacaattggacaaattcttttgatttgctttgaatgatttcaaataggtcttcgtctacagtaggcataccattagataatctagccattataaagtgcacgtttacatatctacgttctggaggagtaagaacgtgactattgagacgaatggctcttcctactatctgacgaagagacgcctcgttccatgtcatatctagaatgaagatatcattgattgagaagaagctaataccctcgcctccactagaagagaatacgcatgttttaatgcattctccgttagtgtttgattcttggttaaactcagccaccgccttgattctagtatcttttgttctagatgagaactctatattagagataccaaagactttgaaatatagtaataagatttctattcctgactgattaacaaatggttcaaagactagacatttaccatgggatgctaatattcccaaacatacatctataaatttgacgcttttctcttttaattcagtaaatagagagatatcagccgcactagcatcccctcccaatagttctccccttttaaaggtatctaatgcagatttagaaaattctctatctcttaatgaatttttaaaatcattatatagtgttgctatctcttgcgcgtattcgcccggatcacgattttgtctttcaggaaagctatcgaacgtaaacgtagtagccatacgtctcagaattctaaatgatgatatacctgtttttatttcagcgagtttagccttttgataaatttcttcttgctttttcgacatattaacgtatcgcattaatactgttttcttagcgaatgatgcagacccttctacgtcatcaaaaatagaaaactcgttattaactatgtacgaacataggcctcctagtttggagactaattctttttcatcaactagacgtttattctcaaatagcgattggtgttgtaaggatcctggtcgtagtaagttaaccaacatggtgaattcttgcacactattgacgataggtgtagccgataaacaaatcatcttatggttttttaatgcgatggtcttagataaaaaattatatactgaacgagtaggacggatcttaccatcttctttgattaatgatttagaaatgaagttatgacattcatcaataatgacgcatattctactcttggaattaatagttttgatattagtaaaaaatttatttctaaaattttgatcatcgtaattaataaaaatacaatccttcgttatctctggagcgtatctgagtatagtgttcatccaaggatcttctatcaaagcctttttcaccaataagataatagcccaattcgtataaatatccttaagatgtttgagaatatatacagtagtcattgttttaccgacacccgtttcatggaacaataaaagagaatgcatactgtctaatcctaagaaaactcttgctacaaaatgttgataatccttgaggcgtactacgtccgaccccatcatttcaacgggcatattagtagttctgcgcaatgcataatcgatataggccgcgtgtgatttactcatttatgagtgataagtaataactatgttttaaaaatcacagcagtagtttaactagtcttctctgatgtttgttttcgatactttttgaatcagaagtcatactagaataaagcaacgagtgaacgtaatagagagcttcgtatactctattcgaaaactctaagaacttattaatgaattccgtatccactggattgtttaaaatactaaattgaacactgttcacatccttccaagaagaagacttagtgacggacttaacatgagacataaataaatccaaattttttttacaaacatcactagccaccataatggcgctatcttttaaccagctatcgcttacgcattttagcagtctaacatttttaaagagactacaatatattctcatagtatcgattacacctctaccgaatagagtaggaagtttaataatacaatatttttcgtttacaaaatcaaataatggtcgaaacacgtcgaaggttaacatcttataatcgctaatgtatagattgttttcagtgagatgattattagatttaatagcatctcgttcacgtttgaacagtttattgcgtgcgctgaggtcggcaactacggcgtccgctttagtactcctcccataatactttacgctattaatctttaaaatttcatagactttatctagatcgctttctggtaacatgatatcatgtgtaaaaagttttaacatgtcggtcggcattctatttagatcattaactctagaaatctgaagaaagtaattagctccgtattccagactaggtaatgggcttttacctagagacagattaagttctggcaatgtttcataaaatggaagaaggacatgcgttccctcccggatattttttacaatttcatccatttacaactctatagtttgttttcattattattagttattatctcccataatcttggtaatacttaccccttgatcgtaagataccttatacaggtcattacatacaactaccaattgtttttgtacataatagattggatggttgacatccatggtggaataaactactcgaacagatagtttatctttccccctagatacattagccgtaatagttgtcggcctaaagaatatctttggtgtaaagttaaaagttagggttcttgttccattattgctttttgtcagtagttcattataaattctcgagatgggtccgttctctgaatatagaacatcatttccaaatctaacttctagtctagaaataatatcggtcttattcttaaaatctattcccttgatgaagggatcgttaatgaacaaatccttggcctttgattcggctgatctattatctccgttatagacgttacgttgactagtccaaagacttacaggaatagatgtatcgatgatgttgatactatgtgatatgtgagcaaagattgttctcttagtggcatcactatatgttccagtaatggcggaaaactttttagaaatgttatatataaaagaattttttcgggttccaaacattaacagattagtatgaagataaacactcatattatcaggaacattatcaatttttacatacacatcagcatcttgaatagaaacgataccatcttctggaacctctacgatctcggcagactccggataaccagtcggtggaccatcgctaacaataactagatcatccaacaatctactcacatatgcatctatataatctttttcatcttgtgagtaccctggatacgaaataaatttattatccgtatttccataataaggtttagtataaacagagagcgatgttgccgcatgaacttcagttacagtcgccgttggttggtttatttgacctattactctcctaggtttctctataaatgatggtttaatttgtacattcttaaccatatatccaataaagctcaattcaggaacataaacaaattctttgttgaacgtttcaaagtcgaacgaagagtcacgaataacgatatcggatactggattgaaggttaccgttacggtaatttttgaatcggatagtttaagactgctgaatgtatcttccacatcaaacggagttttaatataaacgtatactgtagatggttctttaatagtgtcattaggagttaggccaatagaaatatcattaagttcactagaatatccagagtgtttcaaagcaattgtattattgatacaattattatataattcttcgccctcaatttcccaaataacaccgttacacgaagagatagatacgtgattaatacatttatatccaacatatggtacgtaaccgaatcttcccatacctttaacttctggaagttccaaactcagaaccaaatgattaagcgcagtaatatactgatccctaatttcgaagctagcgatagcctgattgtctggaccatcgtttgtcataactccggatagagaaatatattgcggcatatataaagttggaatttgactatcgactgcgaagacattagaccgtttaatagagtcatccccaccgatcaaagaattaatgatagtattattcattttctatttaaaatggaaaaagcttacaataaactccgtagagaaatatctataatttgtgagttttccttaaagtaacagcttccgtaaacgccgtctttatctcttagtaagtttattgtatttatgaccttttccttatcttcatagaatactaaaggcaacaaagaaatttttggttcttctctaagagctacgtgagacttaaccatagacgccaacgaatccctacatattttagaacagaaatacccaacttcaccacccttgaatgtctcaatactaataggtttaaaaaccaaatcttgattacaaaaccaacacttatcaattacactatttgtcttaatagacacatctgccatagatttataatactttggtagtatacaagcgagtgcttcttctttagcgggcttaaaaactgctttaggtgctgaaataaccacatctggaaggcttactcgcttagccatttaattacggaactatttttttatacttctaatgagcaagtagaaaacctctcatctacaaaaacatactcgtgtccataatcctctaccatagtaacacgttttttagatctcatatgtgctaaaaagttttcccatactaattggttactattatttttcgtataatttttaacagtttgaggttttagatttttagttacagaagtgatatcgaatattttatccaaaaagaatgaataattaattgtcttagaaggagtgttttcttggcaaaagaataccaagtgcttaaatatttctactacttcattaattttttcggtactcagattcagtttctcatcttttacttgattgattatttcaaagactaacttataatcctttttatttattctctcgttagccttaagaaaactagatacaaaatttgcatctacatcatccgtggatatttgatttttttccatgatatccaagagttccgagataatttctccagaacattgatgagacaataatctccgcaatacatttctcaaatgaataagtttattagacacatggaagtttgactttttttgtacctttgtacatttttgaaataccgactcgcaaaaaatacaatattcatatccttgttcagatactataccgttgtgtctacaaccgctacataatcgtagattcatgttaacactctacgtatctcgtcgtccaatattttatataaaaacattttatttctagacgttgccagaaaatcctgtaatatttttagttttttgggctgtgaataaagtatcgccctaatattgttaccgtcttccgccaatatagtagttaaattatccgcacatgcaaaagaacaccgcttaggcggattcagtacaatgttatatttttcgtaccaactcatttaaatatcataatctaaaatagttctgtaatatgtctagcgctaatatattgatcataatcctgtgcataaattaagatacaacaatgtctcgaaatcatcgacatggcttcttccatagttagaagatcgtcgtcaaagttagcaacgtgattcatcaacatttgctgttttgaggcagcaaatactgaaccgtcgccattcaaccattcataaaaaccatcgtctgaatccattgataatttcttgtactggtttttgagagctcgcatcaatctagcatttctagctcccggattgaaaacagaaagaggatcgtacatccagggtccattttctgtaaatagaatcgtataatgtcccttcaagaagatatcagacgatccacaatcaaagaattggtctccgagtttgtaacaaactgcggactttaacctatacatgataccgtttagcatgatttctggtgatacgtcaatcggagtatcatctattagagatctaaagccggtgtaacattctccaccaaacatattcttattctgacgtcgttctacataaaacatcattgctccattaacgataacaggggaatgaacagcactacccatcacattagttcccaatggatcaatgtgtgtaactccagaacatcttccatatcctatgttaggaggagcgaacaccactcttccactattgccatcgaatgccatagaataaatatccttggaattgatagaaatcggactgtcggatgttgtgatcatcttcataggattaacaactatgtatggtgccgcctgaagtttcatatcgtaactgatgccgtttataggtctagccacagaaaccaacgtaggtctaaatccaactatagacaaaatagaagccaatatctgttcctcatctgtcataacttgagagcatccagtatgaataatcttcattagatggggatctaccgcatcatcatcgttacaataaaaaattcccattctaatgttcataattgcttttctaatcatggtatgcatgtttgctctctgaatctctgtggaaattagatctgatacacctgtaatcactatcggattatcctccgtaagacgattaaccaacaacatataattataagactttacttttctaaattcataaagttgctggattaggctataggtgtctccatgtacatacgcgttctcgagcgcaggaagtttaataccgaatagtgccatcagaataggatgaatatagtaattagtttctggttttctataaataaaagacaaatcttgtgaactagacatatcggtaaaatgcatggattggaatcgtgtagtcgacagaagaatatgatgattagatggagagtatattttatctaactctttgagttggtcaccgattctaggactagctcgagaatgaataagtactaaaggatgagtacatttcacagaaacactagcattgttcaatgtgctctttacatgggtaaggagttgaaatagctcgtttctatttgttctgacaatatttagtttattcataatgttaagcatatcctgaatagtaaagttagatgtgtcatacttgttagtagttagatatttagcaattgcattcccatcatttctcaatctcgtactccaatcatgtgtagatgctacttcgtcgatggaaaccatacaatcctttttgataggctgttgagattgattatttcctgcacgtttaggtttggtacgttgatttctagcccctgcggatataaagtcatcgtctacaatttgggacaatgaattgcatacactacaagacaaagatttatcagaagtgtgaatatgatcttcatctaccaaagaaagagtttgattagtataactagattttagtcctgcgttagatgttaaaaaaacatcgctattgaccacggcttccattatttatattcgtagtttttactcgaaagcgtgattttaatatccaatcttattacttttggaatcgttcaaaacctttgactagttgtagaatttgatctattgccctacgcgtatactcccttgcatcatatacgttcgtcaccagatcgtttgtttcggcctgaagttggtgcatatctctttcaacattcgacatgagatccttaagggccatatcgtctagattttgttgagatgctgctcctggatttggattttgttgtgctgttgtacatactgtaccaccagtaggtgtaggagtacatacagtggccacaataggaggttgaggaggtgtaaccgttggagtagtacaagaaatatttccatccgattgttgtgtacatgtagttgttggtaacgtctgagaaggttgggtagatggcggtgtcgtcgtcttttgatctttattaaatttagagataatatcctgaacagcattgctcggcgtcaacgctggaaggagtgaactcgccggcgcatcagtatcttcagacagccaatcaaaaagattagacatatcagatgatgtattagtttgttgtcgtggttttggtgtaggaacagtactactaggtagaagaataggagccggtgtagctgttggaaccggctgtggagttatatgaatagttggttgtagcggttggataggctgtctgctggcgaccgtcatattatctctagctagttgttctcgcaactgtctttgataatacgactcttgagactttagtcctatttcaatcgcttcatcctttttcgtatccggatccttttcttcagaataatagattgacgactttggtgtagaggattctgccagcccctgtgagaacttgttaaagaagtccatttaaggctttaaaattgaattgcgattataagattaaatggcagacacagacgatattatcgactatgaatccgatgatctcaccgaatacgaggatgatgaagaagaggaagaagatggagagtcactagaaactagtgatatagatcccaaatcttcttataagattgtagaatcagcatccactcatatagaagatgcgcattccaatcttaaacatatagggaatcatatatctgctcttaaacgacgctatactagacgtataagtctatttgaaatagcgggtataatagcagaaagctataacttgcttcaacgaggaagattacctctagtttcagaattttctgacgaaacgatgaagcaaaatatgctacatgtaattatacaagagatagaggagggttcttgtcctatagtcatcgaaaagaacggagaattgttgtcggtaaacgattttgacaaagatggtctaaaattccatctagactatattatcaaaatttggaaacttcaaaaacgatattagaatttatacgaatatcgttctctaaatgtcacaatcaagtctcgcatgttcagcaatttattgtcgtactttatatcgtgttcattaacgatatcttgcaaaatagtaatgattctatcttccttcgatagatattcttcagagattattgtcttatattctttcttgttatccgatatgaatttgataagactttgaacattattgatacccgtctgtttaattttttctacagatattttagttttggcagattctatcgtatctgtcaatagacatccaacatcgacattcgacgtcaattgtctataaatcaacgtataaattttagaaataacattagcgaattgttgtgcattgatgtcgttattctgaaacagtatgattttaggtagcattttcttaacaaagagaacgtatttattgttactcagttgaacagatgatatatccagattactaacgcatctgattccgtataccaaactttcagaagaaatggtgtacaattgtttgtattcattcaatgtctctttttcagaaattagtttagagtcgaatactgcaataattttcaagagatagttttcatcagataagattttatttagtgtagatatgataaaactattgttttgttggagaacttgatacgccgcgttctctgtagtcgacgctctcaaatgggaaacaatctccattatttttttggaatcggatactatatcttcggtatcttgacgcagtctagtatacatagagttaagagagattagagtttgtacattaagcaacatgtctctaaatgtggctacaaacttttcctttttcacataatctagtttattatataccgatttcacaacggcaccagatttaaggaaccagaatgaaaaactctgataactacaatatttcatcatagttacgattttatcatcttctatagttggtgtaatagcgcatacctttttctccaagactggaaccaacgtcataaaaatgtttaaatcaaaatccatatcaacatctgatgcgctaagaccagtctcgcgttcaagattatctttactaatggtgacgaactcatcatatagaactctaagtttgtccattatttatttacagatttagttgtttaatttatttgtgctcttccagagttgggatagtatttttctaacgtcggtattatattattaggatctacgttcatatgtatcataatattaatcatccacgttttgataaatctatctttagcttctgaaataacgtatttaaacaaaggagaaaaatatttagctacggcatcagacgcaataacattttttgtaaatgtaacgtatttagacgacagatcttcgttaaaaagttttccatctatgtagaatccatcagttgttaacaccattcccgcgtcagattgaataggagtttgaatagtttgttttggaaatagatccttcaataacttatagttgggtgggaaaaaatcgattttatcactagactctttcttttttactatcattacctcatgaactatttcttgaatgagtatatgtattttctttcctatatcggacgcgttcattggaaaatataccatgtcgttaactataagaatatttttatcctcgtttacaaactgaataatatcagatgtagttcgtaaacgaactatatcatcaccagcacaacatctaactatatgatatccactagtttcctttagccgtttattatcttgttccatattagcagtcattccatcatttaagaaggcgtcaaagataatagggagaaatgacattttggattctgttacgactttaccaaaattaaggatatacggacttactatctttttctcaacgtcgatttgatgaacacacgatgaaaatgtgcttctatgagattgatcatgtagaaaacaacaagggatacaatatttccgcatatcatgaaatatattaagaaatcccaccttattatatttccccaaaggatccatgcatgtaaacattatgccgttatcattaataaagacttctttctcatcggatttgtaaaagttgttactgatttttttcattccaggatctagataattaataatgatgggttttctattcttattctttgtattttggcatatcctagaccagtaaacagtttccactttggtaaaatcagcagacttttgaacgctattaaacatggcattaatggcaataactaaaaatgtaaaatatttttctatgttaggaatatggtttttcactttaatagatatatggtttttggccaaaatgatagatatttttttatccgaggatagtaaaatattattagtcgccgtctctataaaaatgaagctagtctcgatatccaattttattctagaattgataggagtcgccaaatgtaccttatacgttatatctcccttgatgcgttccatttgtgtatctatatcggacacaagatctgtaaatagttttacgttattaatcatcacggtatcgccgtcgctagataatgctaatgtaccatccaagtcccaaatggagagatttaactgttcatcgtttagaataaaatgattaccggtcatattaataaagtgttcatcgtatctagataacaacgacttataattaatgtccaagtcttgaactcgctgaatgatcttttttaacccagttagttttagattggtacgaaatatattgttaaactttgattctacagtaatgtccaaatctagttgtggaaatacttccatcaacattgtttcaaacttgataatattattatctacatcttcatacgatccaaattccggaatagatgtatcacatgctcttgccacccagataaccaaaaagtcacacgctccaggatatacattgtataaaaagctatcgtttttaagtagggtttttttctgcgtgtatacgaagggattaaaaatagtattatcaacgtaactatattccaaattattcttatgagaatagataataatatcgtccttaatatctaacaaatttcctaaatatccctttaattgagtcattcgaagcgtcaatagaatatgtctcttaactatttccggctgttgtatatttaaatgacttcgtaaaaaataatatatgggcgacttctcatctatgtaatcatatggagtgagatatagggctcgttctacctcctgccccttacccacctgtaataccaattgcggacttactatatatcgcatatttatatcgtggggtaaagtgaaaatctactaccgatgatgtaagtcttacaatgttcgaaccagtaccagatcttaatttggaggcctccgtagaactaggggaggtaaatatagatcaaacaacacctatgataaaggaaaatagcggttttatatcccgtagtagacgtctattcgcccatagatctaaggatgatgagagaaaactagcactacgattctttttacaaagactttattttttagatcatagagagattcattatttgttcagatgcgttgacgctgtaaaagacgtcactattaccaaaaaaaataacattatcgtggcgccttatatagcacttttaactatcgcatcaaaaggatgcaaacttacagaaacaatgattgaagcattttttccagaactatataatgaacatagtaagaaatttaaattcaactctcaagtatccatcatccaagaaaaactcggataccagtttggaaactatcacgtttatgattttgaaccgtattactctacagtagctctggctattcgagatgaacattcatctggcatttttaatatccgtcaagagagttatctggtaagttcattatctgaaataacatatagattttatctaattaatctaaaatctgatcttgttcaatggagtgctagtacgggcgctgtaattaatcaaatggtaaatactgtattgattacagtgtatgaaaagttacaactggtcatagaaaatgattcacaatttacatgttcattggctgtggaatcaaaacttccaataaaattacttaaagatagaaatgaattatttacaaaattcattaacgagttaaaaaagaccagttcattcaagataagcaaacgcgataaggatacgctactaaaatattttacttaggactggagttagaatttatagacgactcatttcgtttatcattgttactattattactattactatcattattagtgttggcattattagtattcttcttgtcatcttgttcagaaatatacagcaatgctatacctaatactaaatacattatcatgctcgcaatggctctaacaacaacgaaccaaaatgaatttggtcgtagcttttgttcacaaaaatacataaagaaatgtctacataaatctatggcgccattggctacttgaaatagcgccagtcctcctacagattttaatatagctgtataacatgacatttattcatcatcaaaagagacagagtcaccatctgtcatatttagattttttttcatgtgttcaaagtatcctctactcatttcattataatagtttatcatacttagaattttaggacggatcaatgagtaagacttgactagatcgtcagtagtaatttgtgcatcgtctattctgcatccgcttcgtcgaataatgtatagcatcgctttgagattctccatagctatcaagtctttatacaatgacatggaaatatctgtgaatactttatacttctccaacatcgatgccttaacatcatcgcctactttagcattgaaaatacgttctattgtgtagatggatgtagcaagatttttaaacaacaatgccattttacacgatgattgtctcaagtctccaatcttttgtttagaacgattagctacagagttcaacgcttggctgactagcatattattatctttagaaattgtattcttcaatgaggcgtttatcatatctgtgatttcgttagtcatattacagtctgactgggttgtaatgttatccaacatatcacctatggatacggtacacgtaccagcatttgtaataatcctatctaagatgttgtatggcattgcgcagaaaatatcttctcctgtaatatctccactctcgataaatctactcagattattcttaaatgccttattctctggagaaaagatatcagtgtccatcatttcattaatagtatacgcagaaaagataccacgagtatcaattctatccaagatacttatcggttccgagtcacagataatggtttcctctccttcgggagatcctgcatagaaatatctaggacaatagtttctatactgtctgtaactctgataatctctaaagtcactaactgataccatgaaattgagaagatcaaacgctgaagtaatcaatttttctgcctcgtttttactacaactagttttcatcaatgtagcgacgatgtattgtttagttactcttggtctaatactgatgatagagatattattgcttcccataatggatcttctagtagtcaccttaaagcccattgatgcgaatagcagatagataaagtcttggtatgactcctttctaatatagtacggactacctttgtcacccaactttatacccacataagccataacaacctctttaatagccgtttcatgaggtttatcagccatgagcctgagtagttggaagaatctcatgaatcctgtctcagaaagtcctatatgcatgatagatttatctttcctgggaaactctcgtatagtcatagatgaaatactcttcaaagtttctgaaataagattagtaacagtcttacctccgactactctgggtaacaaacatactctaataggtgttttctctgcggagataatatcagaaaggatagagcaataagtagtattattgtgattataaagaccgaatacataacaggtagaatttataaacatcatgtcctgaaggtttttagacttgtattcctcgtaatccataccgtcccaaaacatggatttggtaactttgatagccgtagatctttgttccttcgccaacaggttaaagaaattaataaagaatttgttgtttctatttatgtccacaaattgcacgtttggaagcgccacggttacattcactgcagcattttgaggatcgcgagtatgaagtacgatgttattgtttactggtatatctggaaagaaatctaccagtctaggaataagagattgatatcgcatagaaatagtaaagtttataatctcatcatcgaagagcattttgttaccattgtaataaatatccactctgtcatatgtataaatgaagtactgttcaaacatgatgagatgtttatatgttggcatagtagtgagatcgacgtttggtaatggcaatgtattaagattaactccataatgtctagcagcatctgcgatgttataagcgtcgtcaaagcggggtcgatcttgtattgttatatattgtctaacacctataagattatcaaaatcttgtctgcttaatacaccgttaacaatttttgccttgaattcttttattggtgcattaataacatccttatagaggatgttaaacaaataagtgttatcaaagttaagatctggatatttcttttctgctagaacatccattgagtcggagccatctggtttaatataaccaccgataaatctagctctgtattctgtatccgtcaatctaatattaagaaggtgttgagtgaaaggtggaagatcgtaaaagctgtgagtattaatgataggattagtttccgaactaatgttaattggggtattaataatatctatatttccagcgttaagtgtaacattaaacagttttaattcacgtgacgtggtatcaattaaataattaatgcccaatttggatatagcagcctgaagctcatcttgtttagttacggatcctaatgagttattaagcaatatatcgaacggatgaacgaaggttgttttaagttggtcacatactttgtaatctagacatagatgcggaagaacggtagaaactatacgaaataaatattcagagtcctctaattgatcaagagtaactattgacttaataggcatcatttatttagtattaaatgacgaccgtaccagtgacggatatacaaaacgatttaattacagagttttcagaagataattatccatctaacaaaaattatgaaataactcttcgtcaaatgtctattctaactcacgttaacaacgtggtagatagagaacataatgccgccgtagtgtcatctccagaggaaatatcctcacaacttaatgaagatctatttccagatgatgattcaccggccactattatcgaacgagtacaacctcatactactattattgacgatactccacctcctacttttcgtagagagttattgatatcggaacaacgtcaacaacgagaaaaaagatttaatattacagtatcgaaaaatgctgaagcaataatggaatctagatctatgataacttctatgccaacacaaacaccatccttgggagtagtttatgataaagataaaagaattcagatgttagaggatgaagtggttaatcttagaaatcaacgatctaatacaaaatcatctgataatttagataattttaccaaaatactatttggtaagactccgtacaaatcaacagaagttaataagcgtatagccatcgttaattatgcaaatttgaacgggtcccccttatcagttgaggacttggatgtttgttcggaggatgaaatagatagaatctataaaacgattaaacaatatcacgaaagtagaaaacgaaaaattatcgtcactaacgtgattattattgtcataaacattatcgagcaagcattgctaaaactcggatttgaagaaatcaaaggactgagtaccgatatcacttcagaaattatcgatgtggagatcggagatgactgcgatgctgtagcatcaaaactaggaatcggtaacagtccggttcttaatattgtattgtttatactcaagatattcgttaaacgaattaaaattatttaatttaatacattcccatatccagacaacaatcgtctggattaatctgttcctgtcgtctcataccggacgacatattaatctttttattagtaggcatctttttagatggtttctttttcccagcattaactgagtcgatacctagaagatcgtgattgatctctccgaccattccacgaacttctaattggccgtctctaacggtaccataaactattttaccagcattagtaacagcttggacaatctgaccatccatcgcattgtacgatgtagtagtaactgttgttctacgtctaggagcaccagaagtatttttggagcccttggaggctgatgtagaagaagacgaggattttgattttggtttacatgtaatacattttgaactctttgattttgtatcacatgcgccggcagtcacatctgtttgagaattaagattattgttgcctcctttgacggctgcatctccaccgatttgcgctagtagatttttaagctgtggtgtaatcttattaactgtttcgatataatcatcgtaactgcttctaacggctaaattttttttatccgccatttagaagctaaaaatatttttatttatacagaagatttaactagattatacaatgaactaatatgatccttttccagattatttacaaacttggtattttttggttctggaggaggcgaatttaaattcggacttggattcggattttgtgagttcttgatcttattatacatcgagtataggatggcgacggtaactgctacacaaataccgatcaacaaaagaataccaatcatttattgacaataacttcactattgatcaagtatgcaatatatcatcttttcactaaataagtagtaataatgattcaacaatgtcgagatatatggacgataataatttagttcatggaaatatcgctatgattggtatgaatgactccgctaactctgtggggcgcgcagtgctttccccacatagaataaattagcattccgactgtgataataataccaagtataaacgccataatactcaatactttccatgtacgagtgggactggtagacttactaaagtcaataaaggcgaagatacacgaaagaatcaaaagaatgattccagcgattagcacgccggaaaaataatttccaatcataagcatcatgtccatttaactaataaaaattttaaatcgccgaatgaacaaagtggaatataaaccatataaaaacaatagtttgtactgcaaaaataatatctatttttgttttcgaagatatggtaaaattaaatagtagtacacagcatgttataactaacagcagcaacggctcgtaattacttatcatttactagacgaaaaggtggtgggatattttcttgctcaaataatacgaatatatcacccatccattttatgcgatgtttatatactctaatctttaatagatctatagacgacgggtttaccaacaatatagattttatcgattcatctaatttaaacccttccttaaacgtgaatgatctattatctggcataacgatgaccctacctgatgaatcggacaatgtactgggccatgtagaataaattatcaacgaattatcgtctacgaacatttatatcatttgttttaattttaggacgcgaataaatagatataaaatagaaaataacagatattacaaccagtgttatggccgcgcccaaccaggtaggcagttttattttatcttttactacaggttctcctggatgtacgtcaccaacggcggacgtagttctagtacaattagacgtaagttccgcttgggaattttttaacgctaaagagttaacgttaatcgtgcacccaacgtatttacatctagttctttgaacatcttgattataatataaccattttctatctctagattcgtcggtgcactcatgtaaccaacataccctaggtcctaaatatttatctccggaattagattttggataattcgcgcaccaacaatttctatttcctttatgatcgttacaaaagacgtataatgccgtatccccaaaagtaaaataatcaggacgaataattctaataaactcagaacaatatctcgcatccatatgtttggagcaaatatcggaataagtagacatagccggtttccgttttgcacgtaaccattctaaacaattggggtttccaggatcgtttctacaaaatccagtcatgaaatcgtcacaatgttctgtcttgtaattattattaaatatttttggacagtgtttggtatttgtcttagaacaacattttgccacgctatcactatcgcccaggagataatccttttttataaaatgacatcgttgcccggatgctatataatcagtagcgtgttttaaatccttaatatattcaggagttacctcgttctgataatagattaatgatccaggacgaaatttgaaagaactacatggttctccatgaattaatacatattgtttagcaaattcaggaactataaaactactacaatgatctatcgacataccatctatcaaacaaaacttgggtttaatttctcccggagatgtttcataatagtacgtataactttcttctgcaaacttaacagctctattatattcaggataattaaaacctaattccatatatttgtctcgtatatctgctattcctggtgctattttgattctattaagagtaacagctgcccccattcttaataatcgtcagtatttaaactgttaaatgttggtatatcaacatctaccttatttcccgcagtataaggtttgttgcaggtatactgttcaggaatggttacatttatacttcttctatagtcctgtctttcgatgttcatcacatatgcaaagaacagaataaacaaaataatgtaagaaataatattaaatatctgtgaattcgtaaatacattgattgccataataattacagcagctacaatacacacaatagacattcccacagtgttgccattacctccacgatacatttgagttactaagcaataggtaataactaagctagtaagaggcaatagaaaagatgagataaatatcatcaatatagagattagaggagggctatatagagccaagacgaacaaaatcaaaccgagtaacgttctaacatcattatttttgaagattcccaaataatcattcattcctccataatcgttttgcatcatacctccatctttaggcataaacgattgctgctgttcctctgtaaataaatctttatcaagcactccagcacccgcagagaagtcgtcaagcatattgtaatatcttaaataactcatttatatattaaaaaatgtcactattaaagatggagtataatctttatgccgaactaaaaaaaatgacttgtggtcaacccctaagtctttttaacgaagacggggatttcgtagaagttgaaccgggatcatcctttaagtttctgatacctaagggattttacgcctctccttccgtaaagacgagtctagtatttgaaacattaacaacgaccgataataaaatcactagtatcaatccaacaaatgcgccaaagttatatcctcttcaacgcaaagtcgtatctgaagtagtttctaatatgaggaaaatgatcgaatcaaaacgtcctctatacattactcttcacttggcgtgtggatttggtaagactattaccacgtgttatcttatggctacacacggtagaaaaaccgtcatttgcgtacccaataaaatgttaatacatcaatggaagacacaggtagaggcagtcggattggaacataagatatccatagatggagtaagtagtctattaaaggaactaaagactcaaagtccggatgtattaatagtagtcagtagacatctgacaaacgatgccttttgtaaatatatcaataagcattatgatttgttcatcttggatgaatcacatacgtataatctgatgaacaatacagcagttacaagatttttagcgtattatcctccgatgatgtgttattttttaactgctacacctagaccagctaaccgaatttattgtaacagtattattaatattgccaagttatccgatctaaaaaaaactatctatgcggtagatagtttttttgagccatattccacagacaatattagacatatggtaaaacgactagatggaccatctaataaatatcatatatataccgagaagttattatctgtagacgagcctagaaatcaacttattcttaataccctggtagaagaattcaagtcaggaactattaatcgcattttagttattactaaactacgtgaacatatggtattattctacaaacgattattagatcttttcggaccagaggttgtatttataggagacgcccaaaatagacgtactccagatatggtcaaatcaatcaaggaactaaatagatttatattcgtatccaccttattttattccggtactggtttagatattcctagtttggattcgttgttcatttgctcggcagtaatcaacaatatgcaaatagagcaattactagggagggtatgtcgagaaacagaactattagataggacggtatatgtatttcctaacacatccatcaaagaaataaagtacatgataggaaatttcatgcaacgaattattagtctgtctgtagataaactaggatttaaacaagaaagttatcggaaacatcaagaatccgatcccacttctgtatgtacaacatcctccagagaagaacgtgtattaaatagaatatttaactcgcaaaatcgttaagaagtttaagcgacgatccgcatgctgcgcaggccagtgtattacccctcatagtattaatataatccaatgatacttttgtgatgtcggaaatcttaaccaatttagactgacaggcagaacacgtcatgcaatcatcatcgtcatcgataactgtagtcttgggcttctttttgcggctcttcattccggaacgcacattggtgctatccatttaggtagtaaaaaataagtcagaatatgccctataacacgatcgtgcaaaacctggtatatcgtctctatctttatcacaatatagtgtatcgacatctttattattattgacctcgtttatcttggaacatggaatgggaacatttttgttatcaacggccacctttgccttaattccagatgttgtaaaattataactaaacagtctatcatcgacacaaatgaaattcttgtttagacgtttgtagtttacgtatgcggctcgttcgcgtctcattttttcagatattgcaggtactataatattaaaaataagaatgaaataacataggattaaaaataaagttatcatgacttctagcgctgatttaactaacttaaaagaattacttagtctgtacaaaagtttgaaattttcagattctgcggctatagaaaagtataattctttggtagaatggggaacatctacttactggaaaataggcgtgcaaaaggtagctaatgtcgagacgtcaatatctgattattatgatgaggtaaaaaataaaccgtttaatattgatccgggctattacattttcttaccggtatattttgggagcgtctttatttattcgaagggtaaaaatatggtagaacttggatctggaaactcttttcaaataccagatgatatgcgaagtgcgtgtaacaaagtattagacagcgataacggaatagactttctgagatttgttttgttaaacaatagatggataatggaagatgctatatcaaaatatcagtctccagttaatatatttaaactagctagtgagtacggattaaacatacccaaatatttagaaattgaaatagaggaagacacattatttgacgacgagttatactctattatagaacgctcttttgatgataaatttccaaaaatatccatatcgtatattaagttgggagaacttaggcggcaagttgtagactttttcaaattctcgttcatgtatattgagtccatcaaggtagatcgtataggagataatatttttattcctagcgttataacaaaatcaggaaaaaagatattagtaaaagatgtagaccatttaatacgatctaaggttagagaacatacatttgtaaaagtaaaaaagaaaaacacattttccattttatacgactatgatgggaacggaacagaaactagaggagaagtaataaaacgaattatagacactataggacgagactattatgttaacggaaagtatttctctaaggttggtagtgcaggcttaaagcaattgactaataaattagatattaatgagtgcgcaactgtcgatgagttagttgatgagattaataaatccggaactgtaaaacgaaaaataaaaaaccaatcagcatttgatttaagcagagaatgtttgggatatccagaagcagattttataacgttagttaataacatgcggttcaaaatagaaaattgtaaggttgtaaatttcaatattgaaaatactaattgtttaaataacccgagtattgaaactatatatggaaactttaaccagttcgtctcaatctttaatatcgtcaccgatgtcaaaaaaagattattcgagtgaaataatatgcgcctttgatataggtgcaaaaaatcctgccagaactgttttagaagtcaaggataactccgttagggtattggatatatcaaaattagactggagttctgattgggaaaggcgcatagctaaagatttgtcacaatatgaatacactacagttcttctagaacgtcagcctagaaggtcgccgtatgttaaatttatctattttattaaaggctttttatatcatacatcggctgccaaagttatttgcgtctcgcctgtcatgtctggtaattcatatagagatcgaaaaaagagatcggtcgaagcatttcttgattggatggacacattcggattgcgagactccgttccggatagacgcaaattagacgatgtagcggatagtttcaatttggctatgagatacgtattagataaatggaatactaattatacaccttataataggtgtaaatctagaaattacataaaaaaaatgtaataacgttagtaacgccattatggataatctatttacctttctacatgaaatagaagatagatatgccagaactatttttaactttcatctaataagttgcgatgaaataggagatatatatggtcttatgaaagaacgcatttcctcagaggatatgtttgataatatagtatataataaagatatacatcctgccattaagaaactagtgtattgcgacatccaacttactaaacacattattaatcagaatacgtatccggtatttaacgattcttcacaagtgaaatgttgtcattatttcgatataaactcagataatagcaatattagctctcgtacagtagagatatttgagagggaaaagtcatctcttgtatcatatattaaaactaccaataagaagagaaaggtcaattacggcgaaataaagaaaactgttcatggaggcactaatgcaaattacttttccggtaaaaagtctgacgagtatctgagtactacagttagatccaacattaatcaaccttggatcaaaaccatttctaagagaatgagagtagatatcattaatcactctatagtaacgcgtggaaaaagctctatattacaaactatagaaattatttttactaatagaacatgtgtgaaaatattcaaggattctactatgcacattattctatccaaggacaaggatgaaaaggggtgtatacacatgattgacaaattattctatgtctattataatttatttctgttgttcgaagatatcatccaaaacgagtactttaaagaagtagctaatgttgtaaaccacgtacttacggctacggcattagatgagaaattattcctaattaagaaaatggctgaacacgatgtttatggagttagcaatttcaaaatagggatgtttaacctgacatttattaagtcgttggatcataccgttttcccctctctgttagatgaggatagcaaaataaagttttttaaggggaaaaagctcaatattgtagcattacgatctctggaggattgtataaattacgtgactaaatccgagaatatgatagaaatgatgaaggaaagatcgactattttaaatagcatagatatagaaacggaatcggtagatcgtctaaaagaattgcttctaaaatgaaaaaaaacactgattcagaaatggatcaacgactagggtataagtttttggtgcctgatcctaaagccggagttttttatagaccgttacatttccaatatgtatcgtattctaattttatattgcatcgattgcatgaaatcttgaccgtcaagcggccactcttatcgtttaagaataatacagaacgaattatgatagaaattagcaatgttaaagtgactcctccagattactcacctataatcgcgagtattaaaggtaagagttatgatgcattagccacgttcactgtaaatatctttaaagaggtaatgaccaaagagggtatatccatcactaaaataagtagttatgagggaaaagattctcatttgataaaaattccgctactaataggatacgggaataaaaatccacttgatacagccaagtatcttgttcctaatgtcataggtggagtctttatcaataaacaatctgtcgaaaaagtaggaattaatctagtagaaaagattacaacatggccaaaatttagggttgttaagccaaactcattcactttctcgttttcctccgtatcccctcctaatgtattaccgacaagatatcgccattacaagatatctctggatatatcacaattggaagcgttgaatatatcatcgacaaagacatttataacggtcaatattgttttgctgtctcaatatttatctagagtgagtctagaattcattagacgtagtttatcatacgatatgcctccagaagttgtctatctagtaaacgcgataatagatagtgctaaacgaattactgaatctattactgactttaatattgatacatacattaatgacctggtggaagctgaacacattaaacaaaaatctcagttaacgatcaacgagttcaaatatgaaatgctgcataactttttacctcatatgaactatacacccgatcaactaaagggattttatatgatatctttactaagaaagtttctctactgtatctaccacacttctagatatccagatagagattcgatggtttgtcatcgcatcctaacgtacggcaaatattttgagacgttggcacatgatgaattagagaattacataggcaacatccgaaacgatatcatgaacaatcacaagaacagaggcacttacgcggtaaacattcatgtactaacaactcccggacttaatcacgcgttttctagcttattgagtggaaagttcaaaaagtcagacggtagttatcgaacacatcctcactattcatggatgcagaatatttctattcctaggagtgttggattttatccggatcaagtaaagatttcaaagatgttttctgtcagaaaataccatccaagtcaatatctttacttttgttcatcggacgttccggaaagaggtcctcaggtaggtttagtatctcaattgtctgtcttgagttccattacaaatatactaacgtctgagtatttggatttggaaaagaaaatttgtgagtatatcagatcatattataaagatgatataagttactttgaaacaggatttccaatcactatagaaaatgctctagtcgcatctcttaatccaaatatgatatgtgattttgtaactgactttagacgtagaaaacggatgggattcttcggtaacttggaggtaggtattactttagttagggatcacatgaatgaaattcgcattaatattggagcgggaagattagtcagaccattcttggttgtggataacggagagctcatgatggatgtgtgtccggagttagaaagcagattagacgacatgacattctctgacattcagaaagagtttccgcatgtcatcgaaatggtagatatagaacaatttacttttagtaacgtatgtgaatcggttcaaaaatttagaatgatgtcaaaggatgaaagaaagcaatacgatttatgtgactttcctgccgaatttagagatggatatgtggcatcttcattagtgggaatcaatcacaattctggacccagagctattcttggatgtgctcaagctaaacaagctatctcttgtctgagttcggatatacgaaataaaatagacaatggaattcatttgatgtatccagagaggccaatcgtgattagtaaggctttagaaacttcaaagattgcggctaattgcttcggccaacatgttactatagcattaatgtcgtacaaaggtatcaatcaagaggatggaattatcatcaaaaaacaatttattcagagaggcggtctcgatatagttaccgcaaagaaacatcaagtagaaattccgttggaaaactttaataacaaagaaagagataggtctaacgcctattcaaaattagaaagtaatggattagttagactgaatgctttcttggaatccggagacgctatggcacgaaatatctcatcaagaactcttgaagatgattttgctagagataatcagattagcttcgatgtttccgagaaatataccgatatgtacaaatctcgcgttgaacgagtacaagtagaacttactgacaaagttaaggtacgagtattaaccatgaaagaaagaagacccattctaggagataaatttaccactagaacgagtcaaaagggaacagtcgcgtatgtcgcggatgaaacggaacttccatacgacgaaaatggtatcacaccagatgtcattattaattctacatccatcttctctagaaaaactatatctatgttgatagaggttattttaacagccgcatattctgctaagccgtacaacaataagggagaaaaccgacctgtctgttttcctagtagtaacgaaacatccatcgatacatatatgcaattcgctaaacaatgttatgagcattcaaatccgaaattgtccgatgaagaattatcggataaaatcttttgtgaaaagattctctatgatcctgaaacggataagccttatgcatccaaagtattttttggaccaatttattacttgcgtctgaggcatttaactcaggacaaggcaaccgttagatgtagaggtaaaaagacgaagctcattagacaggcgaatgagggacgaaaacgtggaggaggtatcaagttcggagaaatggagagagactgtttaatagcgcatggcgcagccaatactattacagaagttttaaaagactcagaagaggattatcaagatgtgtatgtttgtgaaaattgtggagacatagcagcacaaatcaagggtattaatacatgtcttagatgttcaaaacttaatctctctcctctcttaacaaaaattgataccacgcacgtatctaaagtatttcttactcaaatgaacgccagaggcgtaaaagtcaaattagatttcgaacgaaggcctccttcgttttataaaccattagataaagttgatctcaagccgtcttttctggtgtaatattctagtttggtagtagatacatatcaatatcatcaaattcgagatccgaattataaaatgggcgtggattgttaactatagaatcggacgtctgatattcgaaaatctgtggagttttaggttttggtggaggtgtaactgctacttgggatactgaagtctgatattcagaaagctgggggatgttctggttcgacatccaccgatggtgtcacatcactaatcggttcggtaacgtctgtggatggaggtgctacttctacagaacctgtagcctcagttgtcaacggagatacatttttaatgcgaggaaatgtataatttggtaatggtttctcatgtggatctgaagaagaggtaagatatctactagaaagataccgatcacgttctagttctcttttgtagaacttaactttttctttctcagcatctagttgatattccaacctcttcacgttactacgttcagattccaattcacgttcgcatgggttacctccgcagtttttacgagcgatttcacgttcagccttcatgcgtctctccttctctctatcgagtttatcagagcagtctttctgaaggcgatcgaactccataaatttctccaacgctttgattgtttccatagatttccgaagttcagcttttaggactgtgattctttttctttcgaattcacagctggatgtgcaaccgtttccattaccgccatctctaagtttcttttctagatcggcaacatttcatccccatgccttttacattcctcgagtctactgtcgtcgaaatatcgttccagctccttttcgacatcaataactttagcacgttgtctctcaagctctcttttgtagttatctgattccctggcacgtttaagatcttcatgcaattgagtcagctcttaacacaatctcttgcttcttcgtcatagtacttacaatcactatgggatccattgttaccacgtctacactcggcgagctcgcgtttaagagattcaatttcccgtttgtattggtccatgtttccattgctaccaccattagatttacaggctgctagttgtcgttcgagatcagaaatacgggttttcttggaattgatttcgtcgatgtacttggcatcgaaacacttattaagttctttttccaattctacgattttatttctttcgcgagtcaattccctcctgtagtaactatctgttttgtcagattcacgctctctacgtagactttcttgcaagttactaatttgttccctagcacgtccgagtttagttttatatgctgaatagagttctgattcatcctttgagcagatctctagcgatcgtttaagattcctgattctagtctttagcctatttacctcctcagaagatgttccgttaccgttgcgtttacactcgttaagctgtctatcaagatccatgattctatctctaagacgttgcatctctctttccatatcagcattgctttcattattacgtctgcagtcactcaactgtctttcaatatctgagattctatctctaagacgtcgcatctctctctgtttcggcattggtttcattattacgtctacagtcgttcaactgtctttcaagatctgatattctagattggagtctgctaatctctgtagcattttcacggcattcactcagttgtctttcaagatctgagattttagattggagtctgctaatctctgtaagatttcctcctccgctctcgatgcagtcggtcaacttattctctagttctctaatacgcgaacgcagtgcatcaacttcttgcgtgtcttcctggttgcgtgtacattcatcgagtctagattcgagatctctaacgcgtcgtcgttcttcctcaagttctctgcgtactacagaaagcgtgtccctatcttgttgatatttagcaatttctgattctagagtactgattttgcttacgtagttactaatagttgtcttggccttatcaagatcctccttgtatttgtcgcattccttgatatccctacgaagtctggacagttcccattcgacattacgacgtttatcgatttcagctcggagatcgtcatcgcgttgttttagccacatacgactgagttcaagttctcgttgacaagatccatctacttttccattcctaatagtatccagttccttttctagttctgaacgcatttctcgttccctatcaagcgattctctcaattctcggatagtcttcttatcaatttctaataaatctgaaccatcatctgtcccattttgaatatccctgtgttctttgatctcttttgtaagtcggtcgattctttcggttttataaacagaatccctttccaaagtcctaatcttactgagtttatcactaagttctgcattcaattcggtgagttttctcttggcttcttccaactctgttttaaactctccactatttccgcattcttcctcgcatttatctaaccattcaattagtttattaataactagttggtaatcagcgattcctatagccgttcttgtaattgtgggaacataattaggatcttctaatggattgtatggcttgatagcatcatctttatcattattagggggatggacaaccttaattggttggtcctcatctcctccagtagcgtgtggttcttcaataccagtgttagtaataggcttaggcaaatgcttgtcgtacgcgggcacttcctcatccatcaagtatttataatcgggttctacgtctgaatattcttttctaagagacgcgacttcgggagttagtagaagaactctgtttctgtatctatcaacgctggaatcaatactcaagttaaggatagcgaatacctcatcgtcatcatccgtatcctctgaaacgccatcatatgacatttcatgaagtctaacgtattgataaatagaatcagatttagtattaaacagatccttaacctttttagtaaacgcatatgtatattttagatctccagatttcataatatgatcacatgccttaaatgtcagtgcttccatgatataatctggaacactaatgggtgacgaaaaagatacagcaccatatgctacgttgataaataaatctgaaccactaagtagataatgattaatgttaaggaagaggaaatattcagtatatagatatgccttagcatcatatcttgtactaaacacgctaaacagtttattgatgtgatcaatttccaacagaataattagagcagcgggaataccaacaaacatattaccacatccgtattttctatgaatatcacatatcatgttaaaaaatcttgatagaagagcgaatatctcgtctgacttaatgagtcgtagttcagcagcaacataagtcataactgtaaatagaacatactttcctgtagtgttgattctagactccacatcaacaccattattaaaaatagttttatatacatctttaatctgctctccgttaatcgtcgaacgttctagtatacggaaacactttgatttcttatctgtagttaatgacttagtgatatcacgaagaatattacgaattacatttcttgtttttcttgagagacctgattcagaactcaactcatcgttccatagtttttctacctcagtggcgaaatctttggagtgcttggtacatttttcaataaggttcgtgacctccatttattataaaaaattttattcaaaacttaactacaatcgggtaattataaaatcgtagatctcccatgtggtggaatactaccatctatcgcatgtggatggacagtaggtaatggccatgggaacagtaatgtttgcatatttatctttcttgccagtattactgcatattgtcccaatgtttcgatgtgatgttctaacctatcaactgccgctgtatcacaacaatagtgtccgatgaaattaagattatgatccaatgtgtttaatatatgattatcaagtcttatacgatccgcgtcttttttgacaggatcaggttcttctacaggaagaagtttcggcctcttatgatattcatgtctgggaaacggtggtctagggtgaggctccggtatcggagtgggttttggattataatcatcatcgtctatgacatcatcttcgacttcgatatttattttgctatcttgatgatgtcctgtatcagttgcattttcagcactcgactgaatattagcgcattcattgtctattattaccatatttctaaacccaaaatgtatgtgttgaacatcagtactatcgttgatgagtcttatagcatgaattcgcttatcgttatcgggtttatcttctgtcaccttagcaattccttttttattaaactctacataatcatatccatttctattgtttgttctaatataaacgagtatagcatcattgctaaatttttcaatagtatcgaaaacagaatatcctaaaccatataatatatattcagggacactcaaactaaatgtccaggattctcctaaatacgtaaactttaatagtgcgaaatcattcaaaaatctaccacttatagatagatagtacataaatgcgtatagtagtctacctatctctttattatgaaaaccggcattacgatcatatatgtcgtgatatacctgtgatccgtttacgttaaaccataaatacatgggtgatcctataaacatgaatttatttctaattctcagagctatagttaattgaccgtgtaatatttgcttacatgcatacttgatacgctcattaataaaatttttatcattgctcgttatctcagaatcgtatatataaggagtaccatcgtgattcttaccagatattatacaaaatactatatataaaatatattgaccaacgttagtaatcatataaatgtttaacgttttaaattttgtattcaatgatccattatcatacgctagcatggtcttgtaatattcattctttaaaatataatattgtgttagccattgcattggagctcctaatggagattttctattctcatccattttaggataggctttcataaagtccctaataacttcgtgaataatgtttctatgttttctactgatgcatgtatttgcttcgatttttttatcccatgtttcatctatcatagatttaaacgcagtaatgctcgcaacattaacatcttgaaccgttggtacaattccgttccataaatttataatgttcgccatttatataactcattttttgaatatacttttaattaacaaaagagttaagttactcatatgggcgccgtccagtctgaacatcaatctttttagccagagatatcatagccgctcttagagtttcagcgtgattttccaacctaaatagaacttcatcgttgcgtttacaacacttttctatttgttcaaactttgttgttacattagtaatctttttttccaaattagttagccgttgtttgagagtttcctcattgtcgtcttcatcggctttaacaattgcttcgcgtttagcctctggctttttagcagcctttgtagaaaaaaattcagttgctggaattgcaagatcgtcatctccggggaaaagagttccgtccatttaaagtacagattttagaaactgacactctgcgttatttatatttggtacaacacatggattataaatattgatgttaataacatcagaaaatgtaaagtctatacattgttgcatcgtgttaaattttctaatggatctagtattattgggtccaacttctgcctgaaatccaaatatggaagcggatacaaaaccgtttcctggataaaccacacatctccacttttgctttacatcagaaattgtgtcgttgacatcttgaactctcctatctaatgccggtgttccacctatagattttgaatattcgaatgctgcatgagtagcattaaattccttaatattgccataattttcatatattgagtaaccctggataaaaagtaaacacaccgcagccgtcgctaccacaataaaaaaaattgatagagagttcatttataatctattagaagctgacaaaatttttttacacgcatcagacaatgctttaataaatagttcaacatctacttttgtcatatcgaaccgatggtatgattctaacctagaattacatccgaaaaagttgactatgttcatagtcattaagtcattaacaaacaacattccagactctggattataagacgatactgtttcgtcacaattacctaccttaatcatgtgattatgaatattggctattagagcaccttctaagaaatctataatatctttgaaacacgatttaaaatcaaaccacgaatatacttctacgaagaaagttagtttacccataggagaaataactataaatggagatctaaatacaaaatccggatctatgatagttttaacattattatattctctattaaatacctccacatctaaaaatgttaattttgaaactatgtcttcgtttattaccgtacctgaactaaacgctataagctctattgtttgagaactctttaaacgatattcttgaaatacatgtaacaaagtttcctttaactcggtcggtttatctaccatagttacagaatttgtatccttatctataatataataatcaaaatcgtataaagttatataattatcgcgttcagattgggatcttttcaaatagactaaaaaccccatttctctagtaagtatcttatgtatatgtttgtaaaatatcttcatggttggaatatgctctaccgcagttagccattcctcattgacagcggtagatgtattagacaaaactattccaatgtttaacaagggccattttacgagattattaaatccttgtttgataaatgtagccaatgagggttcgagttcaacgacgattgaattctcttcccgcggatgctgcatgatgaacgacgggatgttgttcgattgatttggaattctttttcgactttttgtttatattaaatattttaaaatttatagcggatagcaattcatgtaccacggataatgtagacgcgtattgcgcatcgatatctttattattagataaatttatcaataaatgtgagaagtttgcctcgttaaggtcttccatttaaatattatataaacatttgtgtttgtaacttattcgtcttttatggaatagttttttactagtaaagctgcaattacacactttgtccgtaaaacataaatataaacaccagcttttatcaatcgttccaaaaagtcgacggcggacatttttaacatggcatctattttaaatacacttaggtttttggaaaaaacatcattttataattgtaacgattcaataactaaagaaaagattaagattaaacataagggaatgtcatttgtattttataagccaaagcattctaccgttgttaaatacttgtctggaggaggtatatatcatgatgatttggttgtattggggaaggtaacaattaataatctaaagatgatgctattttacatggatttatcatatcatggagtgacaagtagtggagcaatttacaaattgggatcgtctatcgatagactttctctaaataggactattgttacaaaagttaataattatgatgatacattttttgacgacgatgattgatcgctattgcacaattttgtttttttactttctaatatagcgtttagattctttttcatgtgcgaatattgatttactaaaatatcgatgtttaacttttgttctatgacgtccttatcagcggtatcggtacatatacgtaattcaccttcacaaaatacggagtcttcgataataatagccaatcgattattggatctagctgtctgtatcatattcaacatgtttaatatatcctttcgtttcccctttacaggcatcgatcgtagcatattttccgcgtctgagatggaaatgttaaaactacaaaaatgcgtaatgttagcccgtcctaatattggtacgtgtctataagtttggcatagtagaataatagacgtgtttaaatgccttccaaagtttaagaattctattagagtattgcattttgatagtttatcacctacatcatcaaaaataagtaaaaagtgtgctgattttttatgattttgtgcgacagcaatacatttttctatgttacttttagttcgtatcagattatattctagagattcctgactactaacgaaattaatatgatttggccaaatgtatccatcataatctgggttataaacgggtgtaaacaagaatatatgtttatattttttaactagtgtagaaaacagagatagtaaatagatagtttttccagatccagatcctcccgttaaaaccattctaaacggcatttttaataaattttctcttgaaaattgtttttcttggaaacaattcataattatatttacagttactaaattaatttgataataaatcaaaatatggaaaactaaggtcgttagtagggaggagaacaaagaaggcacatcgtgacataaataacatttattatcatgatgacaccagaaaacgacgaagagcagacatctgtgttctccgctactgtttacggagacaaaattcaaggaaagaataaacgcaaacgcgtgattggtctatgtattagaatatctatggttatttcactactatctatgattaccatgtccgcgtttctcatagtgcgcctaaatcaatgcatgtctgctaacgaggctgctattactgacgccgctgttgccgttgctgctgcatcatctactcatagaaaggttgcgtctagcactacacaatatgatcacaaagaaagctgtaatggtttatattaccagggttcttgttatatattacattcagactaccagttattctcggatgctaaagcaaattgcactgcggaatcatcaacactacccaataaatccgatgtcttgattacctggctcattgattatgttgaggatacatggggatctgatggtaatccaattacaaaaactacatccgattatcaagattctgatgtatcacaagaagttagaaagtatttttgtgttaaaacaatgaactaatatttatttttgtacattaataaatgaaatcgcttaatagacaaactgtaagtaggtttaagaagttgtcggtgccggccgctataatgatgatactctcaaccattattagtggcataggaacatttctgcattacaaagaagaactgatgcctagtgcttgcgccaatggatggatacaatacgataaacattgttatttagatactaacattaaaatgtctacagataatgcggtttatcagtgtcgtaaattacgagccagattgcctagaccggatactagacatctgagagtattgtttagtattttttataaagattattgggtaagtttaaaaaagaccaatgataaatggttagatattaataatgataaagatatagatattagtaaattaacaaattttaaacaactaaacagtacgacggatgctgaagcgtgttatatatacaagtctggaaaactggttaaaacagtatgtaaaagtactcaatctgtactatgtgttaaaaaattctacaagtgacaacaaaaaatgaattaataataagtcgttaacgtacgccgccatggacgccgcgtttgttattactccaatgggtgtgttgactataacagatacattgtatgatgatctcgatatctcaatcatggactttataggaccatacattataggtaacataaaaactgtccaaatagatgtacgggatataaaatattccgacatgcaaaaatgctactttagctataagggtaaaatagttcctcaggattctaatgatttggctagattcaacatttatagcatttgtgccgcatacagatcaaaaaataccatcatcatagcatgcgactatgatatcatgttagatatagaagataaacatcagccattttatctattcccatctattgatgtttttaacgctacaatcatagaagcgtataacctgtatacagctggagattatcatctaatcatcaatccttcagataatctgaaaatgaaattgttgtttaattcttcattctgcatatcagacggcaatggatggatcataattgatgggaaatgcaatagtaattttttatcataaaagttgtaaagtaaataataaaacaataaatattgaactagtagtacgtatattgagcaatcagaaatgatgctggtacctcttatcacggtgaccgtagttgcgggaacaatattagtatgttatatattatatatttgtaggaaaaagatacgtactgtctataatgacaataaaattatcatgacaaaattaaaaaagataaagagttctaattccagcaaatctagtaaatcaactgatagcgaatcagactgggaggatcactgtagtgctatggaacaaaacaatgacgtagataatatttctaggaatgagatattggacgatgatagcttcgctggtagtttaatatgggataacgaatccaatgtcatggcgcctagcacagaacacatttacgatagtgttgctggaagcacgctgctaataaataatgatcgtaatgaacagactatttatcagaacactacagtagtaattaatgagacggagactgttgaagtacttaatgaagataccaaacagaatcctaactattcatccaatcctttcgtaaattataataaaaccagtatttgtagcaagtcaaatccgttcattacagaactcaacaataaatttagtgagaataatccgtttagacgagcacatagcgatgattatcttaataagcaagaacaagatcatgaacacgatgatatagaatcatcggtcgtatcattggtgtgattagtttcctttttataaaattgaagtaatatttagtattattgctgccgtcacgttgtacaaatggagatattccctgtattcggcatttctaaaattagcaattttattgctaataatgactgtagatattatatagatacagaacatcaaaaaattatatctgatgagatcaatagacagatggatgaaacggtacttcttaccaacatcttaagcgtagaagttgtaaatgacaatgagatgtaccatcttattccccatagactatcgactattatactctgtattagttctgtcggaggatgtgttatctctatagataatgacatcaatgacaaaaatattctaacatttcccattgatcatgctgtaatcatatccccactgagtaaatgtgtcgtagttagcaagggtcctacaaccatattggttgttaaagcggatatacccagcaaacgattggtaacatcgtttacaaacgacatactgtatgtaaacaatctgtcactgattaattatttgccgttgtctgtattcattattagacgagtcaccgactatttggatagacacatatgcgatcagatatttgcgaataataagtggtattccattataaccatcgacgataagcaatatcctattccatcaaactgtataggtatgtcctctgccaagtacataaattctagcatcgagcaagatactttaatacatgtttgtaacctcgagcatccattcgacttagtatacaaaaaaatgcagtcgtacaattctgtacctatcaaggaacaaatattgtacggtagaattgataatataaatatgagcattagtatttctgtggattaatagatttctagtatggggatcattaatcatctctaatctctaaatacctcataaaacgaaaaaaatactgctacaaatgaaaaaaaagctattatcaaatactgtacggaatggattcattctcttctctttttatgaaactctgttgtatatctactgataaaactggaagcaaaaaatctgataaaaagaataagaataagatcaaggattatatggaacacgattattataaaataacaatagttcctggttcctcttccacgtctactagctcgtggtattatacacatgcctagtaatagtctctttgcgttgacggaaagcagactagaaataacaggctaaaatgttcagacaccataatagttcccaacccagataataacagagtaccatcaacacattcctttaaactcaatcccaaacccaaaaccgttaaaatgtatccggccaattgatagtagataatgaggtgtacagcgcatgataatttacacagtaaccaaaatgaaaatactttagtaattataagaaatatagatggtaacgtcatcatcaacaatccaataatatgccggagagtaaacattgacggataaaacaaaaatgctccgcataactctatcatggcaataacacaaccaaatacttgtaagattcctaaattagtagaaaatacaacggatatcgatgtataagtgatctcgagaaataataagaataaagtaatgcccgtaaagataaacatcaacattgtttggtaatcattaaaccaattagtatgaagttgaactaatttcacagtagattttattccagtgttatcctcgcatgtatacgtacctggtaagatatctttatattctataatcaatgagacatcactatccgataacgaatgaagtctagcactagtatgccatttacttaatatggtcgtcttggaagttttattataagttaaaatatcatggttgtccaatttccatctaatatactttgtcggattatctatagtacacggaataatgatggtattattacatgctgtatactctatagtctttgtagatgttataatcataaaagtacagaggtatatcaacgatattctaactcttgacattttttatttatttaaaatgatacctttgttatttattttattctattttgctaacggtatcgaatggcataagtttgaaacgagtgaagaaataatttctacttacttattagacgacgtattatacacgggtgttaatggggcggtatacacattttcaaataataaactaaacaaaactggtttaactaataataattatataacaacatctataaaagtagaggatgcggataaggatacattagtatgcggaaccaataacggaaatcccaaatgttggaaaatagacggttcagacgacccaaaacatagaggtagaggatacgctccttatcaaaatagcaaagtaacgataatcagtcacaacggatgtgtactatctgacataaacatatcaaaagaaggaattaaacgatggagaagatttgacggaccatgtggttatgatttatacacggcggataacgtaattccaaaagatggtttacgaggagcattcgtcgataaagatggtacttatgacaaagtttacattcttttcactgatactatcggctcaaagagaattgtcaaaattccgtatatagcacaaatgtgcctaaacgacgaaggtggtccatcatcattgtctagtcatagatggtcgacgtttctcaaagtcgaattagaatgtgatatcgacggaagaagttatagacaaattattcattctagaactataaaaacagataatgatacgatactatatgtattcttcgatagtccgcattatgtacctattctatgaataccattaaacaatctttttctacgtcaaaattggaaggatatacaaagcaattgccgtctccagctcctggtatatgtctaccagctggaaaagttgttccacataccacgtttgaagtcatagaaaaatataatgtactagatgatattataaagcctttatctaaccaacctatcttcgaaggaccgtctggtgttaaatggttcgatataaaggagaaggaaaatgaacatcgggaatatagaatatacttcataaaagaaaattctatatattcgttcgatacaaaatctaaacaaactcgtagctcgcaagtcgatgcgcgactattttcagtaatggtaacttcgaaaccgttatttatagcagatatagggataggagtaggaatgccacaaatgaaaaaaatacttaaaatgtaatcttaatcgagtacaccacacgacaatgaacaaacataagacagattatgctggttatgcttgctgcgtaatatgcggtctaattgttggaattatttttacagcgacactattaaaagttgtagaacgtaaattagttcatacaccatcaatagataaaacgataaaagatgcatatattagagaagattgtcctactgactggataagctataataataaatgtatccatttatctactgatcgaaaaacctgggaggaaggacgtaatgcatgcaaagctctaaatccaaattcggatctaattaagatagagactccaaacgagttaagttttttaagaagcattagacgcggatattgggtaggagaatccgaaatattaaaccagacaaccccatataattttatagctaagaatgccacgaagaatggaactaaaaaacggaaatatatttgtagcacaacgaatactcccaaactgcattcgtgttacactatataacaattacactacatttttatcataccactacttcggttagatgttttagaaaaaaataaatatcgccgtaccgttcttgtttttataaaaataacaattaacaattatcaaattttttctttaatattttacgtggttgaccattcttggtggtaaaataatctcttagtgttggaatggaatgctgtttaatgtttccacactcatcgtatattttgacgtatgtagtcacatcgtttacgcaatagtcagactgtagttctatcatgcttcctacattagaaggaggaacagttttaaagtctcttggttttaatctattaccgttagttttcatgaaatcctttgttttatccacttcacattttaaataaatgtccactatacattcttctgttaattttactagatcgtcatgggtcatagaatttataggttccgtagtccatggatccaaactagcaaacttcgcgtatacggtatcgcgattagtgtatacaccaactgtatgaaaattaagaaaacagtttaatagatcaacagaaatatttaatcctccgtttgatacagatgcaccatatttatggattttggattcacacgttgtttgtctgaggggttcgtctagcgttgcttctacataaacttctattcccatatattctttattgtcagaatcgcataccgatttatcatcatacactgtttgaaaactaaatggtatacacatcaaaataacaaatactaacgagtacattctgcaatattgttatcgtaattggaaaaatagtgttcgagtgagttggattatgtgagtattggattgtatattttattttatattttgtaataagaataaaatgctaatgtcaagtttattccaatagatgtcttattaaaaacatatataataaataacaatggctgaatggcataaaattatcgaggatatctcaaaaaataataagttcgaggatgccgccatcgttgattacaagactacaaagaatgttctagctgctattcctaacagaacatttgccaagattaatccgggtgaaattattcctctcatcactaatcgtaatattctaaaacctcttattggtcagaaatattgtattgtatatactaactctctaatggatgagaacacgtatgctatggagttgcttactgggtacgcccctgtatctccgatcgttatagcgagaactcataccgcacttatatttttgatgggtaagccaacaacatccagacgtgacgtgtatagaacgtgtagagatcacgctacccgtgtacgcgcaactggtaattaaaataaaaagtaatattcatatgtagtgtcaattttaaatgatgatgatgaaatggataatatccatattgacgatgtcaataatgccggtattggcatacagctcatcgatttttagatttcattcagaggatgtggaattatgttatgggcatttgtattttgataggatctataatgtagtaaatataaaatataatccgcatattccatatagatataattttattaatcgcacgttaaccgtagatgaactagacgataatgtcttttttacacatggttattttttaaaacacaaatatggttcacttaatcctagtttgattgtctcattatcaggaaacttaaaatataatgatatacaatgctcagtaaatgtatcgtgtctcattaaaaatttggcaacgagtacatctactatattaacatctaaacataagacttattctctacatcggtccacgtgtattactataataggatacgattctattatatggtataaagatataaatgacaagtataatggcatctatgattttactgcaatatgtatgctaatagcgtctacattgatagtgaccatatacgtgtttaaaaaaataaaaatgaactcttaattatgctatgctattagaaatggataaaatcaaaattacggttgattcaaaaattggtaatgttgttaccatatcgtataacttggaaaagataactattgatgtcacacctaaaaagaaaaaagaaaaggatgtattattagcgcaatcagttgctgtcgaagaggcaaaagatgtcaaggtagaagaaaaaaatattatcgatattgaagatgacgatgatatggatgtagaaagcgcataatacgatctataaaaataagtatataaatactttttatttactgtactcttactgtgtagtggtgataccctactcgattatttttttaaaaaaatacttattctgattcttctagccatttccgtgttcgttcgaatgccacatcgacgttaaagataggggagtagttgaaatctagttctgcattgttggtacgcacctcaaatgtagtgttggatatcttcaacgtatagttgttgagtagtgatggttttctaaatagaattctcttcatatcattcttgcacgcgtacatttttagcatccatcttggaattctagatccttgttctattcccaatggtttcatcaatagaagattaaacatatcgtacgaacacgatggagagtaatcgtagcaaaagtaagcatttcctttaatctcagatcccggatactggatatattttgcagccaacacgtgcatccatgcaacatttcctacatatacccggctatgcaccgcgtcatcatcgactgtacgatacataatgttaccgtgttgcttacattgctcgtaaaagactttcgtcaatttgtctccttctccgtaaattccagtgggtcttaggcaacaagtatacaattttgctccattcatgattacggaattattggctttcataaccagttgctcggccatacgtttactttttgcgtatacatgtcctggtgatatatcataaagggtatgctcatggccgatgaatggatcaccgtgtttatttggtcctattgcttccatgctactagtatagatcaaatacttgattcctaggtccacacaagctgccaatatagtctgtgttccataatagtttactttcatgatttcattatcggtgtattttccaaatacatccactagagcagccgtatgaataatcagatttaccccatctagcgcttctctcaccttatcaaagtcgtttatatcacattgtatatagtttataaccttaactttcgaggttattggttgtggatcttctacaatatctatgactctgatttcttgaacatcatctgcactaattaacagttttactatatacctgcctagaaatccggcaccaccagtaaccgcgtacacggccattgctgccactcataatatcagactacttattctattttactaaataatggctgtttgtataatagaccacgataatatcagaggagttatttactttgaaccagtccatggaaaagataaagttttaggatcagttattggattaaaatccggaacgtatagtttgataattcatcgttacggagatattagtcaaggatgtgattccataggcagtccagaaatatttatcggtaacatctttgtaaacagatatggtgtagcatatgtttatttagatacagatgtaaatatatctacaattattggaaaggcgttatctatttcaaaaaatgatcagagattagcgtgtggagttattggtatttcttacataaatgaaaagataatacattttcttacaattaacgagaatggcgtttgatatatcagttaatgcgtctaaaacaataaatgcattagtttacttttctactcagcaaaataaattagtcatacgtaatgaagttaatgatacacactacactgtcgaatttgatagggacaaagtagttgacacgtttatttcatataatagacataatgacaccatagagataagaggggtgcttccagaggaaactaatattggttgcgcggttaatacgccggttagtatgacttacttgtataataagtatagttttaaactgattttagcagaatatataagacacagaaatactatatccggcaatatttattcggcattgatgacactagatgatttggctattaaacagtatggagacattgatctattatttaatgagaaacttaaagtagactccgattcgggactatttgactttgtcaactttgtaaaggatatgatatgttgtgattctagaatagtagtagctctatctagtctagtatctaaacattgggaattgacaaataaaaagtataggtgtatggcattagccgaacatatatctgatagtattccaatatctgagctatctagactacgatacaatctatgtaagtatctacgcggacacactgagagcatagaggataaatttgattattttgaagacgatgattcgtctacatgttctgccgtaaccgacagggaaacggatgtataattttttttatagcgtgaaggatatgataaaaaatataattgttgtatttatcccattccaatcaccttatatgattctgtaacacaatgaaggagtctcatagatgtatagaggtcagatactggtttgataaactgtttattccacatgagtatgtttgactttatggttagacccgcatactttaacaaatcactgaaaattggagttaggtattgacctctcagaatcagttgccgttctggaacattaaatgtattttttatgatatactccaacgcatttatgtgggcatacaacaagtcattactaatggagtattccaagagttttagttgtctagtatttaacaagagaagagatttcaacagactgtttatgaactcgaatgccgcctcattgtcgcttatattgatgatgtcgaattctcccaatatcatcaccgatgagtagctcatcttgttatcgggatccaagttttctaaagatgtcattaaaccctcgatcatgaatggatttatcatcatcgtttttatgttggacatgagcttagtccgtttgtccacatctatagacgacgatttctgaattattttatatatccctctctttaactccaggaacttgtcaggatggtctactttaatatgttctcgtctaagagatgaaaatctttggatggttgcacgcgacttttctctaaaggatgacgttgcccaagatcctctcttaaatgaatccatcttatccttggacaagatggacagtctattttccttagatggtttaatatttttgttacccatgatctataaaggtagacctaatcgtctcggatgacctatatatttattttcagttttattatacgcataaattgtaaaaaatatgttaggtttacaaaaatgtctcgtggggcattaatcgtttttgaaggattggacaaatctggaaaaacaacacaatgtatgaacatcatggaatctataccggcaaacacgataaaatatcttaactttcctcagagatccactgtcactggaaagatgatagatgactatctaactcgtaaaaaaacctataatgatcatatagttaatctattattttgtgcaaatagatgggagtttgcatcttttatacaagaacaactagaacagggaattactttaatagttgatagatacgcgttctctggagtagcgtatgccgccgctaaaggcgcgtcaatgactctcagtaagagttatgaatctggattgcctaaacccgacttagttatattcttggaatctggtagcaaagaaattaatagaaacgtcggcgaggaaatttatgaagatgttacattccaacaaaaggtattacaagaatataaaaaaatgattgaagaaggagatattcattggcaaattatttcttctgaattcgaggaagatgtaaagaaggagttgattaagaatatagttatagaggctatacacacggttactggaccagtggggcaactgtggatgtaatagtgaaattacattttttataaatagatgttagtacagtgttataaatggatgaagcatattactctggcaacttggaatcagtactcggatacgtgtccgatatgcataccgaactcgcatcaatatctcaattagttattgccaagatagaaactatagataatgatatattaaacaaggacattgtaaattttatcatgtgtagatcaaacttggataatccatttatctctttcctagatactgtatatactattatagatcaagagaactatcagaccgaattgattaattcattagacgacaatgaaattatcgattgtatagttaataagtttatgagcttttataaggataacctagaaaatatagtagatgctatcattactctaaaatatataatgaataatccagattttaaaactacgtatgccgaagtactcggttccagaatagccgatatagatattaaacaagtgatacgtgagaatatactacaattgtctaatgatatccgcgaacgatatttgtgaaaaatattaaaaaaaaatactttttttattaaatgacgtcgcttcgcgaatttagaaaattatgctgtgatatatatcacgcatcaggatataaagaaaaatctaaattaattagagactttataacagatagggatgataaatatttgatcattaagctattgcttcccggattagacgatagaatttataacatgaacgataaacaaattataaaattatatagtataatatttaaacaatctcaggaagatatgctacaagatttaggatacggatatataggagacactattaggactttcttcaaagagaacacagaaatccgtccacgagataaaagcattttaactttagaagacgtggatagtttcttaactacgttatcatccgtaactaaagaatcgcatcaaataaaattattgactgatatcgcatccgtttgtacatgtaatgatttaaaatgtgtagtcatgcttattgataaagatctaaaaattaaagcgggtcctcggtacgtacttaacgctattagtcctaatgcctatgatgtgtttagaaaatctaataacttgaaagagataatagaaaatgcatctaaacaaaatctagactctatatctatttctgttatgactccaattaatcccatgttagcggaatcgtgtgattctgtcaataaggcgtttaaaaaatttccatcaggaatgtttgcggaagtcaaatacgatggtgaaagagtacaagttcataaaaataataacgagtttgccttctttagtagaaacatgaaaccagtactctctcataaagtggattatctcaaagaatacataccgaaagcatttaaaaaagctacgtctatcgtattggattctgaaattgttcttgtagacgaacataatgtaccgctcccgtttggaagtttaggaatacacaaaaagaaagaatataaaaactctaacatgtgtttgttcgtgtttgactgtttgtactttgatggattcgatatgacggacattccattgtacgaacgaagatcttttctcaaagatgttatggttgaaatacccaatagaatagtattctcagagttgacgaatattagtaacgagtctcagttaactgacgtattggatgatgcactaacgagaaaattagaaggattggtcttaaaagatattaatggagtatacgaaccgggaaagagaagatggttaaaaataaagcgagactatttgaacgagggttccatggcagattctgccgatttagtagtactaggtgcttactatggtaaaggagcaaagggtggtatcatggcagtctttctaatgggttgttacgacgatgaatccggtaaatggaagacggttaccaagtgttcaggacacgatgataatacgttaagggttttgcaagaccaattaacgatggttaaaattaacaaggatcccaaaaaaattccagagtggttggtagttaataaaatctatattcccgattttgtagtagaggatccgaaacaatctcagatatgggaaatttcaggagcagagtttacatcttccaagtcccataccgcaaatggaatatccattagatttcctagatttactaggattagagaagataaaacgtggaaagaatctactcatctaaacgatttagtaaacttgactaaatcttaatagttacatacaaactgaaaattaaaataacactatttagttggtggtcgccatggatggtgttattgtatactgtctaaacgcgttagtaaaacatggcgaggaaataaatcatataaaaaatgatttcatgattaaaccatgttgtgaaagagtttgtgaaaaagtcaagaacgttcacattggcggacaatctaaaaacaatacagtgattgcagatttgccatatatggataatgcggtatccgatgtatgcaattcactgtataaaaagaatgtatcaagaatatccagatttgctaatttgataaagatagatgacgatgacaagactcctactggtgtatataattattttaaacctaaagatgttattcctgttatcatatctataggaaaggataaagatgtctgtgaactattaatctcatcagacatatcgtgtgcatgcgtggagttaaattcatatcacgtagccattcttcccatggatgtttccttttttaccaaaggaaatgcatcattgattattctcctgtttgatttctctatcgatgcagcacctctcttaagaagtgtaaccgataataatgttattatatctagacaccagcgtctacatgacgagcttccgagttccaattggttcaagttttacataagtataaagtccgactattgttctatattatatatggttgttgatggatctgtgatgcatgcgatagctgataatagaactcacgcaattattagcaaaaatatattagacaatactacgattaacgatgagtgtagatgctgttattttgaaccacagattaggattcttgatagagatgagatgctcaatggatcatcgtgtgatatgaacagacattgtattatgatgaatttacctgatgtaggcaaatttggatctagtatgttggggaaatatgaacctgacatgattaagattgctctttcggtggctggtaatttaataagaaatcgagactacattcccgggagacgaggatatagctactacgtttacggtatagcctctagataatttttttaagcacgaaataaaaaacataattttaaaccaatctatttcatactattttgtgtgatcaccatggacataaagatagatattagtatttctggtgataaatttacggtgactactaggagggaaaatgaagaaagaaaaaaatatctacctctccaaaaagaaaaaactactgatgttatcaaacctgattatcttgagtacgatgacttgttagatagagatgagatgtttactattctagaggaatattttatgtacagaggtctattaggcctcagaataaaatatggacgactctttaacgaaattaaaaaattcgacaatgatgcggaagaacaattcggtactatagaagaactcaagcagaaacttagattaaattctgaagagggagcagataactttatagattatataaaggtacaaaaacaggatatcgtcaaacttactgtatacgattgcatatctatgataggattgtgtgcatgcgtggtagatgtttggagaaatgagaaactgttttctagatggaaatattgtttacgagctattaaactgtttattaatgatcacatgcttgataagataaaatctatactgcagaatagactagtatatgtggaaatgtcatagaaagttaaaagttaatgagagcaaaaatatataaggttgtattccatatttgttattttttctgtaatagttagaaaaatacattcgatggtctatctaccagattattatgtgttataaggtactttttctcataataaactagagtatgagtaagatagtgtttttcaaaacatataaatctaaaattgatggatgagatatacagctattaatttcgaaaatatattttaatctgataactttaaacatggatttttgatggtggtttaacgttttaaaaaaagattttgttattgtagtatatgataatattaaaagatggatataaagaatttgctgactgcatgtactattttttacattactacattggctacggcagatatacctactccgccaccaacgggtcatgtgacaagggagaatatcttgataagaggcataatcaatgttgtaatcggtgtccacctggagaatttgccaaggttagatgtaatggtaacgataacacaaaatgtgaacgctgcccacctcatacatataccacaatcccaattattctaatggatgtcatcaatgtagaaaatgcccaaccggatcatttgataaggtaaagtgtaccggaacacagaacagtaaatgttcgtgtcttcctggttggtattgtgctactgattcttcacagactgaagattgttgaaattgtgtaccaaaaaggagatgtccatgcggatactttggtggaatagatgaacaaggaaatcctatttgtaaatcgtgttgtgttggtgaatattgcgactacctacgtaattatagacttgatccatttcctccatgcaaactatctaaatgtaattaattatgattttgatgataatgttaccatacattatatcgctacttggttagtgtattattcagtatgaagacctattaataattacttatcttttgacgatcttgttataattataatataaaaatacttatggcatagtaactcataattgctgacgcgataaattcgtaataatctgttttgttcaaatttttataaggaatctacaggcataaaaataaaaatataatttataatatactcttacagcgcgccatcatgaataacagcagtgaattgattgctgttattaatggatttagaaatagtggacgattttgtgatattagtatagttattaatgatgaaaggataaacgctcataaactcatcctatctggagcctccgaatatttttccattctgttttccaataattttatcgattctaatgaatacgaagttaatctaagtcatttagattatcaaagcgttaacgatttgatcgattacatttatgggatacctttgagcctaactaacgataacgtgaaatatattctttcaaccgctgattttttacaaattggatctgctattacggagtgtgaaaattacatacttaaaaatctttgttctaaaaactgtatcgatttctacatatacgctgataaatataataacaagaaaatagaatcagcgtcgtttaacacaatattacaaaatattttgagactcatcaacgatgaaaactttaaatacttaacagaggaatcaatgataaaaattttaagcgatgatatgttaaatataaaaaatgaggattttgcaccactaattctcattaaatggttagagagtactcaacaatcatgcaccgtcgagttacttagatgcctcagaatatcattgctttccccacaagttataaaatcactttatagtcatcaactggttagttcaatctacgaatgtataacattcttaaacaatatagcattcttggatgaatcatttcctagataccatagcatcgagttgatatctatcggtataagtaattcgcatgataagatttccataaactgctacaatcataaaaaaaatacatgggaaatgatatcttcacgtagatataggtgtagtttcgcagtggccgtcctggataatattatctatatgatgggtggatatgatcagtccccgtatagaagttcaaaggttatagcgtacaatacatgtacaaattcttggatatatgatataccagagctaaaatatcctcgttctaattgtgggggactggctgatgacgaatacatttattgtataggcggcatacgcgatcaggattcatcgttgacatctagtattgataaatggaagccatcaaaaccatattggcagaagtatgctaaaatgcgcgaaccaaaatgtgatatgggggttgcgatgttaaacggattaatatatgtcatgggtggaatcgttaaaggtgacacgtgtaccgacgcactagagagtttatcagaagatggatggatgaagcatcaacgtcttccaataaaaatgtccaatatgtcgacgattgttcatgatggcaagatttatatatctggaggttacaacaatagtagtgtagttaatgtaatatcgaatctagtccttagctataatccgatatatgatgaatggaccaaattatcatcattaaacattcctagaattaatcccgctctatggtcagcgcataataaattatatgtaggaggaggaatatctgatgatgttcgaactaatacatctgaaacatacgataaagaaaaagattgttggacattggataatggtcacgtgttaccacgcaattatataatgtataaatgcgaaccgattaaacataaatatccattggaaaaaacacagtacacgaatgattttctaaagtatttggaaagttttataggtagttgatagaacaaaatacataattttgtaaaaataaatcactttttatactaatatgacacgattaccaatacttttgttactaatatcattagtatacgctacaccttttcctcagacatctaaaaaaataggtgatgatgcaactctatcatgtaatcgaaataatacaaatgactacgttgttatgagtgcttggtataaggagcccaattccattattcttttagctgctaaaagcgacgtcttgtattttgataattataccaaggataaaatatcttacgactctccatacgatgatctagttacaactatcacaattaaatcattgactgctagagatgccggtacttatgtatgtgcattctttatgacatcaactacaaatgacactgataaagtagattatgaagaatactccacagagttgattgtaaatacagatagtgaatcgactatagacataatactatctggatctacacattcaccggaaactagttctaagaaacctgattatatagataattctaattgctcgtcggtattcgaaatcgcgactccggaaccaattactgataatgtagaagatcatacagacaccgtcacatacactagtgatagcattaatacagtaagtgcatcatctggagaatccacaacagacgagactccggaaccaattactgataaagaagatcatacagttacagacactgtctcatacactacagtaagtacatcatctggaattgtcactactaaatcaaccaccgatgatgcggatctttatgatacgtacaatgataatgatacagtaccaccaactactgtaggcggtagtacaacctctattagcaattataaaaccaaggactttgtagaaatatttggtattaccgcattaattatattgtcggccgtggcaattttctgtattacatattatatatataataaacgttcacgtaaatacaaaacagagaacaaagtctagatttttgacttacataaatgtctgggatagtaaaatctatcatattgagcggaccatctggtttaggaaagacagccatagccaaaagactatgggaatatatttggatttgtggtgtcccataccactagatttcctcgtcctatggaacgagaaggtgttgattaccattacgttaacagagaggccatctggaagggaatagccgccggaaactttctagaacatactgagtttttaggaaatatttacggaacttctaaaacagctgtgaatacagcggctattaataatcgtatttgtgtgatggatctaaacatcgacggtgttagaagtcttaaaaatacgtacctaatgccttactcggtgtatataagacctacctctcttaaaatggttgagaccaagcttcgttgtagaaacactgaagctaacgatgagattcatcgtcgcgtgatattggcaaaaacggatatggatgaggccaacgaagcaggtctattcgacactattatcattgaagatgatgtgaatttagcatatagtaagttaattcagatactacaggaccgtattagaatgtattttaacactaattagagacttaagacttaaaacttgataattaataatataactcgtttttatatgtggctatttcaacgtctaatgtattagttaaatattaaaacttaccacgtaaaacttaaaatttaaaatgatatttcattgacagatagatcacacattatgaactttcaaggacttgtgttaactgacaattgcaaaaatcaatgggtcgttggaccattaataggaaaaggtggattcggtagtatttatactactaatgacaataattatgtagtaaaaatagagcccaaagctaacggatcattatttaccgaacaggcattttatactagagtacttaaaccatccgttatcgaagaatggaaaaaatctcacaatataaagcacgtaggtcttatcacgtgcaaggcatttggtctatacaaatccattaatgtggaatatcgattcttggtaattaatagattaggtgcagatctagatgcggtgatcagagccaataataatagattaccaaaaaggtcggtgatgttgatcggaatcgaaatcttaaataccatacaatttatgcacgagcaaggatattctcacggagatattaaagcgagtaatatagtcttggatcaaatagataagaataaattatatctagtggattacggattggtttctaaattcatgtctaatggagaacatgttccatttataagaaatccaaataaaatggataacggtactctagaatttacacctatagattcgcataaaggatacgttgtatctagacgtggagatctagaaacacttggatattgtatgattagatggttgggaggtatcttgccatggactaagatatctgaaacaaagaattgtgcattagtaagtgccacaaaacagaaatatgttaacaatactgcgactttgttaatgaccagtttgcaatatgcacctagagaattgctgcaatatattaccatggtaaactctttgacatattttgaggaacccaattatgacgagtttcggcacatattaatgcagggtgtatattattaagtgtggtgtttggtcgatgtaaaatttttgtcgataaaaattaaaaaataacttaatttattattgatctcgtgtgtacaaccgaaatcatggcgatgttttacgcacacgctctcggtgggtacgacgagaatcttcatgcctttcctggaatatcatcgactgttgccaatgatgtcaggaaatattctgttgtgtcagtttataataacaagtatgacattgtaaaagacaaatatatgtggtgttacagtcaggtgaacaagagatatattggagcactgctgcctatgtttgagtgcaatgaatatctacaaattggagatccgatccatgatcaagaaggaaatcaaatctctatcatcacatatcgccacaaaaactactatgctctaagcggaatcgggtacgagagtctagacttgtgtttggaaggagtagggattcatcatcacgtacttgaaacaggaaacgctgtatatggaaaagttcaacatgattattctactatcaaagagaaggccaaagaaatgaatgcacttagtccaggacctatcattgattaccacgtctggataggagattgtatctgtcaagttactgctgtggacgtacatggaaaggaaattatgagaatgagattcaaaaagggtgcggtgcttccgatcccaaatctggtaaaagttaaacttggggagaatgatacagaaaatctttcttctactatatcggcggcaccatcgaggtaaccacctctctggaagacagcgtgaataatgtactcatgaaacgtttggaaactatacgccatatgtggtctgtcgtatatgatcattttgatattgtgaatggtaaagaatgctgttatgtgcatacgcatttgtctaatcaaaatcttataccgagtactgtaaaaacaaatttgtacatgaagactatgggatcatgcattcaaatggattccatggaagctctagagtatcttagcgaactgaaggaatcaggtggatggagtcccagaccagaaatgcaggaatttgaatatccagatggagtggaagacactgaatcaattgagagattggtagaggagttcttcaatagatcagaacttcaggctggtgaatcagtcaaatttggtaattctattaatgttaaacatacatctgtttcagctaagcaactaagaacacgtatacggcagcagcttcctttatactctcatcttttaccaacacaaagggtggatatttgttcattggagttgataataatacacacaaagtaattggattcacggtgggtcatgactacctcagactggtagagaatgatatagaaaagcatatcaaaagacttcgtgttgtgcatttctgtgagaagaaagaggacatcaagtacacgtgtcgattcatcaaggtatataaacctggggatgaggctacctcgacatacgtgtgcgctatcaaagtggaaagatgctgttgtgctgtgtttgcagattggccagaatcatggtatatggatactaatggtatcaagaagtattctccagatgaatgggtgtcacatataaaattttaattaatgtaatagagaacaaataataaggttgtaatatcatatagacaataactaacaattaattagtaactgttatctcttttttaactaaccaactaactatatacctattaatacatcgtaattatagttcttaacatctattaatcattaattcgcttctttaattttttataaactaacattgttaattgaaaagggataacatgttacagaatataaattatatatggatttttttaaaaaggaaatacttgactggagtatatatttatctcttcattatatagcacgcgtgttttccaatttttccacatcccatataatacaggattataatctcgttcgaacatacgagaaagtggataaaacaatagttgattttttatctaggttgccaaatttattccatattttagaatatggggaaaatattctacatatttattctatggatgatgctaatacgaatattataattttttttctagatagagtattaaatattaataagaacgggtcatttatacacaatctcaggttatcatcatccattaatataaaagaatatgtatatcaattagttaataatgatcatccagataataggataagactaatgcttgaaaatggacgtagaacaagacattttttgtcctatatatcagatacagttaatatctatatatgtattttaataaatcatggattttatatagatgccgaagacagttacggttgtacattattacatagatgtatatatcactataagaaatcagaatcagaatcatacaatgaattaattaagatattgttaaataatggatcagatgtagataaaaaagatacgtacggaaacacaccttttatcctattatgtaaacacgatatcaacaacgtggaattgtttgagatatgtttagagaatgctaatatagactctgtagactttaatagatatacacctcttcattatgtctcatgtcgtaataaatatgattttgtaaagttattaatttctaaaggagcaaatgttaatgcgcgtaatagattcggaactactccattttattgtggaattatacacggtatctcgcttataaaactatatttggaatcagacacagagttagaaatagataatgaacatatagttcgtcatttaataatttttgatgctgttgaatctttagattatctattatccagaggagttattgatattaactatcgtactatatacaacgaaacatctatttacgacgctgtcagttataatgcgtataatacgttggtctatctattaaacagaaatggtgattttgagacgattactactagtggatgtacatgtatttcggaagcagtcgcaaacaacaacaaaataataatggaagtactattgtctaaacgaccatctttgaaaattatgatacagtctatgatagcaattactaaacataaacagcataatgcagatttattgaaaatgtgtataaaatatactgcgtgtatgaccgattatgatactcttatagatgtacagtcgctacagcaatataaatggtatattttaaaatgtttcgatgaaatagatatcatgaagagatgttatataaaaaataaaactgtattccaattagttttttgtatcaaagacattaatactttaatgagatacggtaaacatccttctttcgtgaaatgcactagtctcgacgtatacggaagtcgtgtacgtaatatcatagcatctattagatatcgtcagagattaattagtctattatccaagaagctggatcctggagataaatggtcgtgttttcctaacgaaataaaatataaaatattggaaaactttaacgataacgaactatccacatatctaaaaatcttataaacactattaaaatataaaatctaagtaggataaaatcacactacatcattgtttccttttagtgctcgacagtgtatactatttttaacactcataaataaaaatgaaaacgatttccgttgttacgttgttatgcgtactacctgctgttgtttattcaacatgtactgtacccactatgaataacgctaaattaacgtctaccgaaacatcgtttaatgataaacagaaagttacgtttacatgtgatcagggatatcattcttcggatccaaatgctgtctgcgaaacagataaatggaaatacgaaaatccatgcaaaaaaatgtgcacagtttctgattacatctctgaattatataataaaccgctatacgaagtgaattccaccatgacactaagttgcaacggcgaaacaaaatattttcgttgcgaagaaaaaaatggaaatacttcttggaatgatactgttacgtgtcctaatgcggaatgtcaacctcttcaattagaacacggatcgtgtcaaccagttaaagaaaaatactcatttggggaatatatgactatcaactgtgatgttggatatgaggttattggtgcttcgtacataagttgtacagctaattcttggaatgttattccatcatgtcaacaaaaatgtgatatgccgtctctatctaatggattaatttccggatctacattttctatcggtggcgttatacatcttagttgtaaaagtggttttacactaacggggtctccatcatccacatgtatcgacggtaaatggaatcccgtactcccaatatgtgtacgaactaacgaagaatttgatccagtggatgatggtcccgacgatgagacagatttgagcaaactctcgaaagacgttgtacaatatgaacaagaaatagaatcgttagaagcaacttatcatataatcatagtggcgttaacaattatgggcgtcatatttttaatctccgttatagtattagtttgttcctgtgacaaaaataatgaccaatataagttccataaattgctaccgtaaatataaatccgttaaaataatgaataattaataacgaacaagtatcaaaagattaaagaattatagctagaatcaattgagatgtcttcttcagtggatgttgatatctacgatgccgttagagcatttttactcaggcactattataacaagagatttattgtgtatggaagaagtaacgccatattacataatatatacaggctatttacaagatgcgccgttataccgttcgatgatatagtacgtactatgccaaatgaatcacgtgttaaacaatgggtgatggatacacttaatggtataatgatgaatgaacgcgatgtttctgtaagcgttggcaccggaatactattcatggaaatgtttttcgattacaataaaaatagtatcaacaatcaactaatgtatgatataattaatagcgtatctataattctagctaatgagagatatagaagcgcttttaacgacgatggtatatacatccgtagaaatatgattaacaagttgtacggatacgcatctctaactactattggcacgatcgctggaggtgtttgttattatctgttgatgcatctagttagtttgtataaataattatttcaatatactagttaaaattttaagattttaaatgtataaaaaactaataacgtttttatttgtaataggtgcattagcatcctattcgaataatgagtacactccgtttaataaactgagtgtaaaactctatatagatggagtagataatatagaaaattcatatactgatgataataatgaattggtgttaaattttaaagagtacacaatttctattattacagagtcatgcgacgtcggatttgattccatagatatagatgttataaacgactataaaattattgatatgtataccattgactcgtctactattcaacgcagaggtcacacgtgtagaatatctaccaaattatcatgccattatgataagtacccttatattcacaaatatgatggtgatgagcgacaatattctattactgcagagggaaaatgctataaaggaataaaatatgaaataagtatgatcaacgatgatactctattgagaaaacatactcttaaaattggatctacttatatatttgatcgtcatggacatagtaatacatattattcaaaatatgatttttaaaaatttaaaatatattatcacttcagtgacagtagtcaaataacaaacaacaccatgagatatattataattctcgcagttttgttcattaatagtatacacgctaaaataactagttataagtttgaatccgtcaattttgattccaaaattgaatggactggggatggtctatacaatatatcccttaaaaattatggcatcaagacgtggcaaacaatgtatacaaatgtaccagaaggaacatacgacatatccgcatttccaaagaatgatttcgtatctttctgggttaaatttgaacaaggcgattataaagtggaagagtattgtacgggactatgcgtcgaagtaaaaattggaccaccgactgtaacattgactgaatacgacgaccatatcaatttgtacatcgagcatccgtatgctactagaggtagcaaaaagattcctatttacaaacgcggtgacatgtgtgatatctacttgttgtatacggctaacttcacattcggagattctaaagaaccagtaccatatgatatcgatgactacgattgcacgtctacaggttgcagcatagactttgtcacaacagaaaaagtgtgcgtgacagcacagggagccacagaagggtttctcgaaaaaattactccatggagttcgaaagtatgtctgacacctaaaaagagtgtatatacatgcgcaattagatccaaagaagatgttcccaatttcaaggacaaaatggccagagttatcaagagaaaatttaataaacagtctcaatcttatttaactaaatttctcggtagcacatcaaatgatgttaccacttttcttagcatgcttaacttgactaaatattcataactaatttttattaatgatacaaaaacgaaataaaactgcatattatacactggttaacgcccttataggctctaaccattttcaagatgaggtccctgattatagtccttctgttcccctctatcatctactccatgtctattagacaatgtgagaagactgaagaggaaacatggggattgaaaatagggttgtgtataattgccaaagatttctatcccgaaagaactgattgcagtgttcatctcccaactgcaagtgaaggattgataactgaaggcaatggattcagggatatacgaaacaccgataaattataaaaaaagcaatgtgtccgctgtttccgttaataatactattttcgtaactggcggattattcataaataactctaatagcacgatcgtggttaacaatatggaaaaacttgacatttataaagacaaacaatggtcgattatagaaatgcctatggctagggtatatcacggcatcgactcgacatttggaatgttatattttgccggaggtctatccgttaccgaacaatatggtaatttagagaaaaacaacgagatatcttgttacaatcctagaacgaataagtggtttgatatttcatatactatttataagatatccatatcatcattgtgtaaactaaataacgtcttctatgtatttagtaaggacattggatatgtggaaaagtatgatggtgcatggaagttagtacatgatcgtctccccgctataaaggcattatcaacttctccttattgattgaaaatgaaaatataaatagtttttatgtatagcagtattaccctatagttttattgcttactactaacatggatacagatgttacaaatgtagaagatatcataaatgaaatagatagagagaaagaagaaatactaaaaaatgtagaaattgaaaataataaaaacattaacaagaatcatcccaatgaatatattagagaagcactcgttattaataccagtagtaatagtgattccattgataaagaagttatagaatgtatctgtcacgatgtaggaatatagatcatatctactaatttttataatcaatacaaaacataaaaaacaactcgttattacatagcaggcatggaatccttcaagtattgttttgataacgatggcaagaaatggattatcggaaatactttatattctggtaattcaatactatataaggtcagaaaaaatttcactagttcgttctacaattacgtaatgaagatagatcacaaatcacacaagccattgttgtctgaaatacgattctatatatctgtattggatcctttgactatcgacaactggacacgggaacgtggtataaagtatttggctattccagatctgtatggaattggagaaaccgatgattatatgttcttcgttataaaaaattcgggaagagtattcgccccaaaggatactgaatcagtcttcgaagcatgcgtcactatgataaacacgttagagtttatacactctcaaggatttacccatggaaaaatagaaccgaggaatatactgattagaaataaacgtctttcactaattgactattctagaactaacaaactatacaagagtggaaactcacatatagattacaacgaggacatgataacttcaggaaatatcaattatatgtgtgtagacaatcatcttggagcaacagtttcaagacgaggagatttagaaatgttgggatattgcatgatagaatggttcggtggcaaacttccatggaaaaacgaaagtagtataaaagtaataaaacaaaaaaaagaatataaaaaatttatagctactttctttgaggactgttttcctgaaggaaatgaacctctggaattagttagatatatagaattagtatacacgttagattattctcaaactcctaattatgacagactacgtaaactgtttatacaagattgaaattatattcttttttttatagagtgtggtagtgttacggatatttaatattagactatctctatcgcgctacacgaccaatatcgattactatggatatcttcagggaaatcgcatcttctatgaaaggagagaatgtattcatttctccagcgtcaatctcgtcagtattgacaatactgtattatggagctaatggatccactgctgaacagctatcaaaatatgtagaaaaggaggagaacatggataaggttagcgctcaaaatatctcattcaaatccataaataaagtatatgggcgatattctgccgtgtttaaagattcctttttgagaaaaattggcgataagtttcaaactgttgacttcactgattgtcgcactatagatgcaatcaacaagtgtgtagatatctttactgaggggaaaatcaatccactattggatgaaccattgtctcctgatacctgtctcctagcaattagtgccgtatactttaaagcaaaatggttgacgccattcgaaaaggaatttaccagtgattatcccttttacgtatctccgacggaaatggtagatgtaagtatgatgtctatgtacggcaaggcatttaatcacgcatctgtaaaggaatcattcggcaacttttcaatcatagaactgccatatgttggagatactagtatgatggtcattcttccagacaagattgatggattagaatccatagaacaaaatctaacagatacaaattttaagaaatggtgtaactctctggaagctacgtttatcgatgttcacattcccaagtttaaggtaacaggctcgtataatctggtggatactctagtaaagtcaggactgacagaggtgttcggttcaactggagattatagcaatatgtgtaattcagatgtgagtgtcgacgctatgatccacaaaacgtatatagatgtcaatgaagagtatacagaagcagctgcagcaacttgtgcactggtgtcagactgtgcatcaacaattacaaatgagttctgtgtagatcatccgttcatctatgtgattaggcatgttgatggaaaaattcttttcgttggtagatattgctctccgacaactaattgttaaccattttttttaaaaaatagaaaaaacatgtggtattagtgcaggtcgttattcttccaattgcaattggtaagatgacggccaactttagtacccacgtcttttcaccacagcactgtggatgtgacagactgaccagtattgatgacgtcagacaatgtttgactgaatatatttattggtcgtcctatgcataccgcaacaggcaatgcgctggacaattgtattccacactcctctcttttagagatgatgcggaattagtgttcatcgacattcgcgagctggtaaaaaatatgccgtgggatgatgtcaaagattgtgcagaaatcatccgttgttatataccggatgagcaaaaaaccatcagagagatttcggccatcatcggactttgtgcatatgctgctacttactggggaggtgaagaccatcccactagtaacagtctgaacgcattgtttgtgatgcttgagatgctcaattacgtggattataacatcatattccggcgtatgaattgatgagttgtacatcttgacattttcttctttcttctcttctccctttcccagaaacaaactttttttacccactataaaataaaatgagtatactacctgttatatttctttctatatttttttattcttcattcgttcagacttttaacgcgcctgaatgtatcgacaaagggcaatattttgcatcattcatggagttagaaaacgagccagtaatcttaccatgtcctcaaataaatacgctatcatccggatataatatattagatattttatgggaaaaacgaggagcggataatgatagaattataccgatagataatggtagcaatatgctaattctgaacccgacacaatcagactctggtatttatatatgcattaccacgaacgaaacctactgtgacatgatgtcgttaaatttgacaatcgtgtctgtctcagaatcaaatatagatcttatctcgtatccacaaatagtaaatgagagatctactggcgaaatggtatgtcccaatattaatgcatttattgctagtaacgtaaacgcagatattatatggagcgggcatcgacgccttagaaataagagacttaaacaacggacacctggaattattaccatagaagatgttagaaaaaatgatgctggttattatacatgtgttttagaatatatatacggtggcaaaacatataacgtaaccagaattgtaaaattagaggtacgggataaaataataccttctactatgcaattaccagatggcattgtaacttcaataggtagtaatttgactattgcatgcagagtatcgttgagacctcccacaacggatgcagacgtcttttggataagtaatggtatgtattacgaagaagatgatggggacggaaacggtagaataagtgtagcaaataaaatctatatgaccgataagagacgtgttattacatcccggttaaacattaatcctgtcaaggaagaagatgctacaacgtttacgtgtatggcgtttactattcctagcatcagtaaaacagttactgttagtataacgtgaatgtatgttgttacatttccatgtcaattgagtttataagaatttttatacattatcttccaacaagcaattgacgaacgtattgctatgattaactcccacgatactatgcatattattaatcattaacttgcagactatacctagagctattttgacatactcgtgttcttgtgtaattgcagtatctatattattaaagtacgtaaatctagctatagttttattatttaattttagataatataccgtctccttatttttaaaaattgccacatcctttattaaatcatgaatgggaatttctatgtcatagttaatatattgtgaacaacaagagcagatatctataggaaagggtggaatgcgatacattgatctatgtagttttaaaacacacgcaaactttgaagaatttatataaatcattccatcgatacatccttctatgttgagatgtatatatccaggaattcgtttattaatatcgggaaatgtataaactaaaacattgcccggaagcggagcttctaccggagttatatcagtttttaacttacaaaatgtaaccaatacctttgcatgacttgttttgttcggcaacgttagtttaaacttgacgaatggattaattacaatagcatgatccgcgcatctattaagtttttttactttaacgcccttgtatgtttttacagagactttatctaaatttctagtgcttgtatgtgttataaatataacgggatatagaactgaatcacctaccttagatacccaattacattttatcagatccagataataaacaaattttgtcgccctaactaattctatattgttatatattttacaattggttatgatatcatgtaataacttggagtctaacgcgcatcgtcgtacgtttatacaattgtgatttagtgtagtatatctacacatgtatttttccgcactatagtattctggactagtgataaaactatcgttatatctgtcttcaatgaactcatcgagatattgctctctgtcatattcatacacctgcataaactttctagacatcttacaatccgtgttattttaggatcatatttacatatttacgggtatatcaaagatgttagattagttaatgggaatcgtctataataatgaatattaaacaattatatgaggacttttaccacaaagcatcataaaaatgagtcgtcgtctgatttatgttttaaatatcaaccgcgaatcaactcataaaatacaagagaatgaaatatatacatattttagtcattgcaatatagaccatacttctacagaacttgattttgtagttaaaaactatgatctaaacagacgacaacctgtaactgggtatactgcactacactgctatttgtataataattactttacaaacgatgtactgaagatattattaaatcatggagtggatgtaacgatgaaaaccagtagcggacgtatgcctgtttatatattgcttactagatgttgcaatatttcacatgatgtagtgatagatatgatagacaaagataaaaaccacttattacatagagactattccaacctattactagagtatataaaatctcgttacatgttattaaaggaagaggatatcgatgagaacatagtatccactttattagataagggaatcgatcctaactttaaacaagacggatatacagcgttacattattattatttgtgtctcgcacacgtttataaaccaggtgagtgtagaaaaccgataacgataaaaaaggccaagcgaattatttctttgtttatacaacatggagctaatctaaacgcgttagataattgtggtaatacaccattccatttgtatcttagtattgaaatgtgtaataatattcatatgactaaaatgctgttgacttttaatccgaatttcgaaatatgtaataatcatggattaacgcctatactatgttatataacttccgactacatacaacacgatattcttgttatgttaatacatcactatgaaacaaatgttggagaaatgccgatagatgagcgtcgtataatcgtattcgagtttatcaaaacatattctacacgtcctgcagattcgataacttatttgatgaataggtttaaaaatatagatatttatacccgctatgaaggaaagacattattacacgtagcatgtgaatataataatacacacgtaatagattatcttatacgtatcaacggagatataaatgcgttaaccgacaataacaaacacgctacacaactcattatagataacaaagaaaattccccatataccattaattgtttactgtatatacttagatatattgtagataagaatgtgataagatcgttggtggatcaacttccatctctacctatcttcgatataaaatcatttgagaaattcatatcctactgtatacttttagatgacacattttacaatagacacgttaggaatcgcgattctaaaacgtatcgatacgcattttcaaaatacatgtcgtttgataaatacgatggtataataactaaatgtcataaagaaacaatattgctcaaactatccactgttctagacactacactatatgcagttttaagatgccataattcgaaaaagttaagaagatacctcaccgagttaaaaaaatataataacgataagtcctttaaaatatattctaatattatgaatgagagataccttaatgtatattataaagatatgtacgtgtcaaaggtatatgataaactatttcctgttttcacagataaaaattgtctactaacattactaccttcagaaattatatacgaaatattatacatgctgacaattaacgatctttataatatatcgtatccacctaccaaagtatagttgtatttttctcatgcgatgtgtgtaaaaaaactgatattatataaatattttagtgccgtataataaagatgacgatgaaaatgatggtacatatatatttcgtatcattattgttattgctattccacagttacgccatagacatcgaaaatgaaatcacagaattcttcaataaaatgagagatactctaccagctaaagactctaaatggttgaatccagcatgtatgttcggaggcacaatgaatgatatagccgctctaggagagccattcagcgcaaagtgtcctcctattgaagacagtcttttatcgcacagatataaagactatgtggttaaatgggaaaggctagaaaaaaatagacggcgacaggtttctaataaacgtgttaaacatggtgatttatggatagccaactatacatctaaattcagtaaccgtaggtatttgtgcaccgtaactacaaagaatggtgactgtgttcagggtatagttagatctcatattagaaaacctccttcatgcattccaaaaacatatgaactaggtactcatgataagtatggcatagacttatactgtggaattctttacgcaaaacattataataatataacttggtataaagataataaggaaattaatatcgacgacattaagtattcacaaacgggaaaggaattaattattcataatccagagttagaagatagcggaagatacgactgttacgttcattacgacgacgttagaatcaagaatgatatcgtagtatcaagatgtaaaatacttacggttataccgtcacaagaccacaggtttaaactaatactagatccaaaaatcaacgtaacgataggagaacctgccaatataacatgcactgctgtgtcaacgtcattattgattgacgatgtactgattgaatgggaaaatccatccggatggcttataggattcgattttgatgtatactctgttttaactagtagaggcggtattaccgaggcgaccttgtactttgaaaatgttactgaagaatatataggtaatacatataaatgtcgtggacacaactattattttgaaaaaacccttacaactacagtagtattggagtaaatatacaatgcatttttatatacattactgaataattattattattatttatatcgtatttgtgctataacgcgactatctaggtatttgtatctcaccgatagagaacatataaatgtagactctattaaacagttgtgtaaaatatcagatcctaatgcatgttatagatgtggatgtacggctttacatgagtacttttataattatagatcagtcaacggaaaatacaagtatagatacaacggttactatcaatattattcatctagcgattatgaaaattataatgaatattattatgatgattatgatagaactggtatgaacagcgagagcgatagtgagagtgataatatatcaatcaaaacagaatatgagaatgaatatgaattctatgatgaaacacaagatcaaagtacacaactagtaggttacgacattaaactcaaaaccaatgaggatgattttatggctatgatagatcagtgggtgtccatgattatatagatgaatcaattaataaagtagtatatggaagagagtctcacgtaagatggcgggatatatggcaagaacataatgatggcgtatacagtataggaaaggagtgcatagataatatatacgaagacaaccataccgtagacgaattctacaagatagacagcgtatcagatgtagatgacgcggaacacatatctccgataactaatgatgtatctacacaaacatgggaaaagaaatcagagttagatagatacatggaaatgtatcctcgtcatagatatagtaagcattctgtctttaagggattttctgacaaagttagaaaaaatgatttagacatgaatgtggtaaaagaattactttctaacggtgcatctctaacaattaaggatagcagtaataaggatccaataaccgtttattttcgaagaacgataatgaatttagaaatgattgatgaacgaaagtatatagtacactcctatctaaaaaattataaaaatttcgattatccatttttcaggaagttagttttgactaataaacattgtctcaacaattattataatataagcgacagcaaatatggaacaccgctacatatattggcgtctaataaaaaattaataactcctaattacatgaagttattagtgtataacggaaatgatataaacgcacgaggtgaagatacacaaatgcgaactccattacacaaatatttgtgtaaatttgtatatcataatattgaatatggtatccgatactataatgaaaagattatagacgcatttatagagttaggagccgatctaactattccaaatgacgatggaatgataccagtagtttactgtatacactcaaatgccgaatatggttataacaatattactaacataaagataatacgtaaactacttaatcttagtagacgtgcgtcacataatctatttagagatcgagtcatgcacgattatataagtaatacatatattgatcttgagtgtttagatattattagatcgttggatggattcgatatcaatggttactttgaaggacgtacaccacttcattgcgctatacaacataacttcactcagattgctaagtacttattagatcgaggagctgatatagtcgtacccaacacattgattatacatcagtacatacagtaaatagcatagatatggaggaggatacaaatatttcaaataaagttatgagatacgacactgtcaataatatatgggaaacattacctaacttctggactggaactataaatccaggcgtggtctcgcataaagatgatatatatgttgtatgcgacatcaaagatgaaaaaaatgttaaaacttgtatatttagatataacacgaatacgtataacggatgggaattggtcacgacgacagaaagcagattatcagctctgcatactattctttataacaataccataatgatgttacattgttatgaatcgtatatgttacaagatacatttaatgtgtacactcgcgaatggaatcatatgtgtcatcaacattcgaatagttatatcatgtacaatatactacccatctactaaatataatagaataaaataaatgagtatgatcattttagataacgattgattttatcattaccgcttcattcttatattctttgcttacggaacctatatttagaaacatctactaacgattttttatgcttgcattattaatggtatgtaatatgattgattgtgtacgcaataccaatttgttaagtatgaatacggggtacaaacataaactgaagtttaacattatttatttatgatatatatcgttattgtttggtctataccatggatatctttaaagaactaatcttaaaacacacggatgaaaatgttttgatttctccagtttctattttatctactttatctattctaaatcatggagcagctggttctacagctgaacaactatcaaaatatatagagaatatgaatgagaatacacccgatgacaataatgacatggacgtagatattccgtattgtgcgacactagctaccgcaaataaaatatacggtagcgatagtatcgagttccatgcctccttcctacaaaaaataaaagacgattttcaaactgtaaactttaataatgctaaccaaacaaaggaactaatcaacgaatgggttaagacaatgacaaatggtaaaattaattccttattgactagtccgctatccattaatactcgtatgacagttgttagcgccgtccattttaaagcaatgtggaaatatccattttctaaacatcttacatatacagacaagttttatatttctaagaatatagttaccagtgttgatatgatggtgagcactgagaataacttgcaatatgtacatattaatgaattattcggaggattctctattatcgatattccatacgagggaaactctagtatggtaattatactaccggacgacatagaaggtatatataacatagaaaaaaatataacagatgaaaaatttaaaaaatggtgtggtatgttatctactaaaagtatagacttgtatatgccaaagtttaaagtggaaatgacagaaccgtataatctggtaccgattttagaaaatttaggacttactaatatattcggatattatgcagattttagcaagatgtgtaatgaaactatcactgtagaaaaatttctacatacgacgtttatagatgttaatgaggagtatacagaagcatcggccgttacaggagtatttatgactaacttttcgatggtatatcgtacgaaggtctacataaaccatccattcatgtacatgattaaagacaacacaggacgtatactttttatagggaaatactgctatccgcaataaatataaacaaatagacttttatcacgtttatctatgtctaaatattacaaatagtaatagtataaactaaagctgataatacttaaaaaaataataatatcatttacaattaatagtataaactaaaaattaaacaaatcgttattataagtaatatcaaaatgatgatatacggattaatagcgtgtcttatattcgtgacttcatccatcgctagtccactttatattcccgttattccacccatttcggaagataaatcgttcaatagtgtagaggtattagtttccttgtttagagatgaccaaaaagactatacggtaacttctcagttcaataactacactatcgataccaaagactggactatcggcgtactatccacacctgatggtttggatataccattgactaatataacttattggtcacggtttactataggtcgtgcattgttcaaatcagagtctgaggatattttccaaaagaaaatgagtattctaggtgtttctatagaatgtaagaagtcgtcgacattacttacttttttgaccgtgcgtaaaatgactcgagtatttaataaatttccagatatggcttattatcgaggagactgtttaaaagccgtttatgtaacaatgacttataaaaatactaaaactggagagactgattacacgtacctctctaatggggggttgcctgcatactatcgtaatggggtcgatggttgattattgattagtatattccttattctttttattcacacaaaaagaacatttttataaacatgaaaccactgtctaaatgtaattatgatcttgatttatagatgaagatcagcctttagaggattttaaccagtatgtttaatatgaaaaaaataaacataacatattttgagattaagcgctattgtgcaagattatattagaatcaaattaatctttcatacgagaaaaataacgacatacgtcgtcaacaaattaaactttttatttattagttaactagcttatagaacttgctcattgttatgtttctaaaacgggtacgacatataggacaattatccgacgcaccggtttctcttcgtgttttatgccatatattgatgcatgttatgcaaaatatatgagtacacgaatccaataaaccaaagtatctatcgttttgagtaaacaacttcatagcaaattccacattctttttctttacttactctatacacgtcctcgtatttatccagtattttgatgatatccaactcagaaatggttgttgtattattgggtgtatttggagtataggtattattagctatgtaccaatttaccaaccctcttaatattgattgaacaatcacatcggttatccaatcaataaccacattaataactaaattgtagtgtatatatagaccatatatgtttctatttttttgacagttacgtatagtttcagtaagttttgattgttgtattcctgtatctctagataagttagtcatatagtcccttccggcgatacgttttttccaagcccgaaattgattagccaaatgtgtatttatttttgtgatattgatataatatgtaatgttattaatatttcggataatgcatactgttagtcttatatcatttggttcatctatgtattgtaatattgttacatgatctatagatgatgtattgattttggcaggatcgaattccatatccgcgactaaacagtgaaaaaaatgtaaatactttttaaattttaaattagtaaaacttttttttattttttatgattccaaaaatactgaatacaaagtcctaaattataaatatggagatcatactaccacaacttattattatgcatactcagccggtgtaatagatagatatatataattctattacaccggcagacaattaccgatcggtatttgtcgttaccaacataccgtataatatgtaatatacaattccataacccattgacagttgttatacatcaaaattgcaattcttttgattacgatgttataagaatgtagttaattgatgtatgatgttaatgtgtcctctttcctcttataacatcgtaatcaaaaacttttttataatatatacctaataatgtgtcttaatagttctcgtgattcgtcaaacaatcattcttataaaatataataaagcaacgtaaaacacataaaaataagcgtaactaataagacaatggatatttacgacgataaaggtctacagactattaaactgtttaataatgaatttgattgtataaggaatgacatcagagaattatttaaacatgtaactgattccgatagtatacaacttccgatggaagacaattctgatattatagaaaatatcagaaaaatactatatagacgattaaaaaatgtagaatgtgttgacatcgataacacaataacttttatgaaatacgatccaaatgatgataataagcgtacgtgttctaattgggtacccttaactaataactatatggaatattgtctagtaatatatttggaaacaccgatatgtggaggcaaaataaaattataccaccctacaggaaatataaagtcggataaggatattatgtttgcaaagactctagactttaaatcaaagaaagtgttaactggacgtaaaacaattgccgttctagacatatccgtttcatataatagatcaatgactactattcactacaacgacgacgttgatatagatatacatactgataaaaatggaaaagagttatgttattgttatataacaatagatgatcattacttggttgatgtggaaactataggagttatagtcaatagatctggaaaatgtctgttagtaaataaccatctaggtataggtatcgttaaagataaacgtataagcgatagttttggagatgtatgtatggatacaatatttgacttttctgaagcacgagagttattttcattaactaatgatgataacaggaatatagcatgggacactgataaactagacgatgatacagatatatggactcccgtcacagaagatgattacaaatttctttctagactagtattgtatgcaaaatctcaatcggatactgtattcgactattatgttcttactggtgatacggaaccacccactgtattcattttcaaggtaactagattttactttaatatgccgaaataaaaaatttttgtataatatctagaggtagaggtattgtttagataaatacaaataacatagatacatcgcatacttagcatttttataaatatacataagacatacactttatacattttttttgtaaaaatactcataaaaaaatttataaaaattatggcacaaccatatcttgtataggtagtttagttcgtcgagtgaacctataaacagataatagacaacacgtaataataataatgcctactaatacaagcataataccgggagatgggatatatgacgttgtagtgtttgggttttctgaacgttgatagtctactaatactacatgctgacatctaatgcctgtataaccatgagagcatctacaatacataccgtcaatatctctagcgtggatacagtcaccgtgtaaacaatatccatctccctctggaccgcataatctgatagctggaatatctgttgtagcgtttgtaatttctggcgatgtcgtttcgatagcgttaccactatcggcgaatgatctgattatcatagcagcgaacaacaacatcagatatttcatcgacatttttgatggattttgtgtttatgctgtttctcagtgtgtgtttatgacaagattgggaattttatattattaattcagtaatataaactaataatatattgttaattgtgtaaataatataaaaataacaatacaatattgaatgtgttgctgttaaaaatgatcataaacacggagtttattttatatgtctcgcataaacattactaaaaaaatatattgttctgtttttctttcacatctttaattatgaaaaagtaaatcattatgagatggacgagattgtacgcatcgttcgcgacagtatgtggtacatacctaacgtatttatggacgacggtaagaatgaaggtcacgtttctgtcaacaatgtctgtcatatgtatttcacgttctttgatgtggatacatcgtctcatctgtttaagctagttattaaacactgcgatctgaataaacgaggtaactctccattacattgctatacgatgaatacacgatttaatccatctgtattaaagatattgttacaccacggcatgcgtaactttgatagcaaggatgaaaaaggacaccactatcaatcgataacaagatctttgatatactaacggacaccattgatgactttagtaaatcatccgatctattgctgtgttatcttagatataaattcaatgggagcttaaactattacgttctgtacaaaggatccgacgaggatgaactcacttctcttcattactactgtaaacacatatccacgttctacaaaagcaattattacaagttaagtcacactaagatgcgagccgagaagcgattcatctacgcgataatagattatggagcaaacattaacgcggttacacacttaccttcaacagtataccaaacatagtcctcgtgtggtgtatgctcttttatctcgaggagccgatacgaggatacgtaataatcttgattgtacacccatcatggaacgattgtgcaacaggtcatattctcataatgttactcaattggcacgaacaaaaggaagaaggacaacatctactttatctattcataaaacataatcaaggatacactctcaatatactacggtatctactagataggttcgacattcagaaagacgaatactataataccgcctttcaaaattgtaacaacaatgttgcctcatacatcggatacgacatcaaccttccgactaaagacggtattcgacttggtgtttgaaaacagaaacatcatatacaaggcggatgttgtgaatgacatcatccaccacagactgaaagtatctctacctatgattaaatcgttgttctacaagatgtcagaattctctccctacgacgattactacgtaaaaaagatactagcctactgcctattaagggacgagtcattcgcggaactacatagtaaattctgtttaaacgaggactataaaagtgtatttatgaaaaatatatcattcgataagatagattccatcatcgtgacataagtcgccttaaagagattcgaatctccgacaccgacctgtatacggtatcacagctatcttaaagccatacattcagacagtcacatttcatttcccatgtacgacgatctcatagaacagtgccatctatcgatggagcgtaaaagtaaactcgtcgacaaagcactcaataaattagagtctaccatcggtcaatctagactatcgtatttgcctccggaaattatgcgcaatatcatctaaacagtatgttgtacggaaagaaccattacaaatattatccatgatagaaagaaaatatctatatgattggagaagtaggaaacaggaacaagacgacgattactacattattaaatcatgaagtccgtattatactcgtatatattgtttctctcatgtataataataaacggaagagatatagcaccgcatgcaccatccgatggaaagtgtaaagacaacgaatacaaacgccataatctgtgtccgggaacatacgcttccagattatgcgatagcaagactaacacacgatgtacgccgtgtggttcgggtaccttcacatctcgcaataatcatttacccgcttgtctaagttgtaacggaagacgcgaccgtgtaacacgactcacaatagaatctgtgaatgctctcccggatattattgtcttctcaaaggatcatccggatgcaaggcatgtgtttcccaaacaaaatgtggaataggatacggagtatccggagacgtcatctgttctccgtgtggtctcggaacatattctcacaccgtctcttccgcagataaatgcgaacccgtacccagtaatacctttaactatatcgatgtggaaattaatctgtatccagttaacgaccactaccggtctcagcgaatccatctcaacgtcggaactaactattactatgaatcataaagactgtaatcccgtatttcgtgaggaatacttctccgtccttaataaggtagcaacttcaggtttctttacaggagaaaggtgtgcactctgaatttcgagattaaatgcaataacaaaaatttttcctccaaacagttaacgaaagcaaagaataatactatcatgccgcattcggagactgtctatctagcgtcgacatctatatactatatagtaataccaatactcaagactacgaaactgatacaatctcttatcatgtgggtaatgttctcgatgtcgatagccatatgcccggtagttgcgatatacataaactgatcactaattccaaacccacccactttttatagtaagtttttcacccataaataataaatacaataattaatttctcgtaaaagtagaaaatatattctaatttattgcacggtaaggaagtagaatcataaagaacagtactcaatcaatagcaatcatgaaacaatatatcgtcctggcatgcatgtgcctgccagtcttcagcaatcatcctcatcctcctcctcgtgtacggaagaagaaaacaaacatcatatgggaatcgatgttattatcaaagtcacaaagcaagaccaaacaccgaccaatgataagatttgccaatccgtaacggaaattacagagtccgagtcagatccagatcccgaggtggaatcagaagatgattccacatcagtcgaggatgtagatcctcctaccacttattactccatcatcggtggaggtctgagaatgaactttggattcaccaaatgtcctcagattaaatccatctcagaatccgctgatggaaacacagtgaatgctagattgtccagcgtgtccccaggacaaggtaaggactctcccgcgatcactcatgaagaagctctggctatgatcaaagactgtgaggtgtctatcgacatcagatgtagcgaagaagagaaagacagcgacatcaagacccatccagtactcgggtctaacatctctcataagaaagtgagttacgaagatatcatcggttcaacgatcgtcgatacaaaatgtgtcaagaatctagagtttagcgttcgtatcggagacatgtgcaaggaatcatctgaacttgaggtcaaggatggatttaagtatgtcgacggatcggcatctgaaggtgcaaccgatgatacttcactcatcgattcaacaaaactcaaagcgtgtgtctgaatcgataactctattcatctgaaattggatgagtagggttaatcgaacgattcaggcacaccacgaattaaaaaagtgtaccggacactatattccggtttgcaaaacaaaaatgttcttaactacattcacaaaaagttacctctcgcgacttcttctttttctgtctcaatagtgtgatacgattatgacactattcctattcctattcctatttcctttcagggtatcacaaaaatattaaacctctttctgatggtctcataaaaaaagttttacaaaaatatttttattctctttctctctttgatggtctcataaaaaaagttttacaaaaatatttttattctctttctctctttgatggtctcataaaaaa

SEQ ID NO: 7 - DNA, 163444 bp, Vaccinia virus
  source 1..163444: mol_type = genomic DNA
atatacttatcgttgaagactcttccagagacgatagctgattgagtacaaagtccaatgattgcacgaagttcttcggcggttttcatggagtcatttctgatgaaacatttaatgatctaaatttcagtttatgtttgtaccccgtattcatacttaacaaattggtattacataccattaataatgcaagcataaaaaatcgttagtagatgtttctaaatataggttccgtaagcaaagaatataagaatgaagcggtaatgataaaatcaatcgttatctaaaatgatcatactcatttattttattctattatattaacacatacatttttaacagcaacacattcaatattgtattgttatttttatattatttacacaattaacaatatattattagtttatattactgaattaataatataaaattcccaatcttgtcataaacacacactgagaaacagcataaacacaaaatccatcaaaaatgttgataaattatctgatgttgttgttcgctgctatgataatcagatcattcgccgatagtggtaacgctatcgaaacgacatcgccagaaattacaaacgctacaacagatattccagctatcagattatgcggtccagagggagatggatattgtttacacggtgactgtatccacgctagagatatcgacggtatgtattgtagatgctctcatggttatacaggcattagatgtcagcatgtagtattagtagactatcaacgttcagaaaaaccaaacactacaacgtcatatatcccatctcccggtattatgcttgtattagtaggcattattattattacgtgttgtctattatctgtttataggttcactcgacgaactaaactacctatacaagatatggttgtgccataatttttataaattttttttatgagtatttttacaaaaatgtataaagtgtatgtcttatgtatatttataaaaatgctaaatatgcgatgtatctatgttatttgtatttatctaaacaatacctctacctctagatattatacaaaaattttttatttcggcatattaaagtaaaatctagttaccttgaaaatgaatacagtgggtggttccgtatcaccagtaagaacataatagtcgaatacagtatccgattgagattttgcatacaatactagtctagaaagaaatttgtaatcatcttctgtgacgggagtccatatatctgtatcatcgtcccatgctatattcctgttatcatcattagttaatgaaaataactctcgtgcttcagaaaagtcaaatattgtatccatacatacatctccaaaactatcgcttatacgtttatctttaacgatacctatacctagatggttatttactaacagacattttccagatctattgactataactcctatagtttccacatcaaccaagtaatgatcatctattgttatataacaataacataactcttttccgtttttatcagtatgtatatctatatcaacgtcgtcgttgtagtgaatagtagtcattgatctattatatgaaacggatatgtctagaacggcaattgttttacgtccagttaacactttcgttgatttaaagtctagagtctttgcaaacataatatccttatccgactttatatttcctgtagggtggtataattttattttgcctccacatatcggtgtttccaaatatattactagacaatattccatatagttattagttaagggtacccaattagaacacgtacgcttattatcatcatttggatcgtatttcataaaagttattgtactatcgatgtcaacacattctacattttttaatcgtctatatagtatttttctgatattttctataatatcagaattgtcttccatcggaagttgtatactatcggaatcagttacatgtttaaataattctctgatgtcattccttatacaatcaaattcattattaaacagtttaatagtctgtagacctttatcgtcgtaaatatccattgtcttattagttacgcttatttttatgtgtttttacgttgctttattatattttataagaatgattgtttgacgaatcacgagaactattaagacacattattaggtatatattataaaaaagtttttgattacgatgttataagaggaaagaggacacattaacatcatacatcaattaactacattcttataacatcgtaatcaaaagaattgcaattttgatgtataacaactgtcaatgggttatggaattgtatattacatattatacggtatgttggtaacgacaaataccgatcggtaattgtctgccggtgtaatagaattatatatatctatctattacaccggccttgtatacataataataagttgtggtagtatgatctccatatttataatttaggactttgtattcagtttttttggaatcataaaaaataaaaaaaagttttactaatttaaaattatttacatttttttcactgtttagtcgcggatatggaattcgatcctgccaaaatcaatacatcatctatagatcatgtaacaatattacaatacatagatgaaccaaatgatataagactaacagtatgcattatcacaaaaataaatccacatttggctaatcaatttcgggcttggaaaaaacgtatcgccggaagggactatatgactaacttatctagagatacaggaatacaacaatcaaaacttactgaaactgtcaaaaaaatagaaacatatatggtctatatatacactacaatttagttattaattggataaccgatgtgattatcaatcaatattaagaaggttggtaaattggtacatagctaataatacctatacacccaataatacaacaaccatttctgagttggatatcatcaaaatactggataaatacgaggacgtgtatagagtaagtaaagaaaaagaatgtgaaatttgctatgaagttgtttactcaaaacgatagatactttggtttattggattcgtgtaatcatatattttgcataacatgcatcaatatatggcatagaacacgaagagaaaccggtgcgtcggataattgtcctatatgtcgtacccgttttagaaacataacaatgagcaagttaactaataaataaaaagtttaatttgttgacgacgtatgtcgttattttttctcgtataaaagattaatttgattctaatataatctttagtattggataaatatcaattcaaattaattccattagattatatcataaataaaaatagtagcacgcactacttcagccaaatattcttttttgaaacgccatctatcgtagtgaggacacaagtgaacctataatgagcaaatttattagtatcggttacatgaaggactttacgtagagtggtgattccactatctgtggtacgaacggtttcatcttctttgatgccatcacccagatgttctataaacttggtatcctttgccaaccaatacatatagctaaactcaggcatatgttccacacatcctgaacaatgaaattctccagaagatgttacaatgtctagatttggacatttggtttcaaccgcgttaacatatgagtgaacacacccatacatgaaagcgatgagaaataggattttcatcttgccaaaatatcactagaaaaaatttatttatcaattttaaaggtataaaaaatacttattgttgctcgaatattttgtatttgatggtatacggaagattagaaatgtaggtattatcatcaactgattctatggttttatgtattctatcatgtttcactattgcgttggaaataatatcatatgcttccacatatattttattttgttttaactcataatactcacgtaattctggattattgacatatctatgaataattttagctccatgatcagtaaatattaatgagaacatagtattaccacctaccattatttttttcatctcattcaattcttaattgcaaagatctatataatcattatagcgttgacttatggactctggaatcttagacgatgtacagtcatctataatcatggcatatttaatacattgttttatagcatagtcgttatctacgatgttagatatttctctcaatgaatcaatcacacaatctaatgtaggtttatgacataatagcattttcagcagttcaatgtttttagattcgttgatggcaatggctatacatgtatatccgttatttgatctaatgttgacatctgaaccggattctagcagtaaagatactagagattgtttattatatctaacagccttgtgaagaagtgtttctcctcgtttgtcaatcatgttaatgtctttaagataaggtaggcaaatgtttatagtactaagaattgggcaagcataagacatgtcacaaagaccctttttgtatgtataagtgtaaaaattataacattcatagttggatttacataggtgtccaatcgggatctctccatcatcgagataattgatggcatctcccttccttttttagtagatatttcatcgtgtaagaatcaatattaatatttctaaagtatccgtgtatagcctctttatttaccacagttccatattccactagagggatatcgccgaatgtcatatactcaattagtatatgttggaggacatccgagttcattgttttcaatatcaaaaagatggtttccttatcatttctccatagtggtacaatactacacattattccgtgcggctttccattttccaaaaacaatttgaccaaatctacatctttattgtatctataatcactatttagataatcagccataattactcgagtgcaacatgttagatcgtctatatatgaataagccgtgttatctattcctttcattaacaatttaacgatgtctatatctatatgagatgacttaatataatattgaagagctgtacaatagtttttatctataaaagacggcttgattccgtgattaattagacatttaacaacttccggacgcacatatgctctcgtatccgactctgaatacagatgagagatgatatacagatgcaatacggtaccgcaatttcgtagttgataatcatcatacgcgtatcagtactcgtcctcataaagaacactgcagccattttctatgaacaaatcaataatttcaggaacaggatcatctgtcattacataattttctataactgaacgatggttttcacatttaacactcaagtcaaatccatgttctaccaacacctttatcaagtcaacgtctacatttttggatttcatatagctgaatatattaaagtcatttatgttgctaaatccagtggcttctagtagagccatcgctatatcctttaactttaacatgtctactatttgtgtattcttctaatggggtagctgtctccaatttttgcgtaatggattagtgccactgtctagtagtagtttgacgacctcgacattattacaatgctcattaaaaaggtatgcgtgtaaagcattattcttgaattggttcctggtatcattaggatctctgtctctcaacatctgtttaagttcatcgagagccacctcctcattttccaaatagtcaaacattttgactgaatgagctactgtgaactctatacacccacacaactaatgtcattaaatatcatgtcaaaaacttgtacaattattaataaaaataatttagtgtttaaattttaccagttccagattttacacctccgttaaccccactttttacaccactggacgatcctcctccccacattccaccgccaccagatgtataagttttagatcctttattactaccatcatgtccatggataaagacactccacatgccgccactaccccctttagaagacatattaataagacttaaggacaagtttaacaataaaattaatcacgagtaccctactaccaacctacactattatatgattatagtttctatttttacagtaccttaactaaagtctctagtcacaagagcaatactaccaacctacactattatatgattatagtttctatttttataggaacgcgtacgagaaaatcaaatgtctaatttctaacggtagtgttgataaacgattatcgtcaatggatacctcctctatcatgtcgtctattttcttactttgttctattaacttattagcattatatattatttgattataaaacttatattgcttattagcccaatctgtaaatatcggattattaacatatcgtttctttgtaggtttatttaacatgtacatcactgtaagcatgtccgtaccatttattttaatttgacgcatatccgcaatttctttttcgcagtcggttataaattctatatatgatggatacatgctacatgtgtacttataatcgactaatatgaagtacttgatacatattttcagtaacgatttattattaccacctatgaataagtacctgtgatcgtctaggtaatcaactgttttcttaatacattcgatggttggtaatttactcagaataatttccaatatcttaatatataattctgctatttctgggatatatttatctgccagtataacacaaatagtaatacatgtaaacccatattttgttattatattaatgtctgcgccattatctattaaccattctactaggctgacactatgcgacttaatacaatgataaagtatactacatccatgtttatatcatcaatatacggcttacaaagttttagtatcgataacacatccaactcacgcatagagaaggtagggaataatggcataatatttattaggttatcatcattgtcattatctacaactaagtttccattttttaaaatatactcgacaactttaggatctctattgccaaatttttgaaaatatttatttatatgcttaaatctatataatgtagctccttcatcaatcatacatttaataacattgatgtatactgtatgataagatacatattctaacaatagatcttgtatagaatctgtatatcttttaagaattgtggatattattacgtaaactattacacaattctaaaatataaaacgtatcacggtcgaataatagttgatcaactatataattatcgattttgtgatttttcttcctaaactgtttacgtaaatagttagatagaatattcattagttcatgaccactatagttactatcgaataacgcgtcaaatatttcccgtttaatatcgcatttgtcaagataataatagagtgtggtatgttcacgataagtataataacgcatctctttttcgtgtgaaattaaatagtttattacgtccaaagatgtagcataaccatcttgtgacctagtaataatataataatagagaactgttttacccattctatcatcataatcagtggtgtagtcgtaatcgtaattgtctaattcatcatcccaattataatattcaccagcacgtctaatctgttctattttgatcttgtatccatactgtatgttgctacatgtaggtattcctttatccaataatagtttaaacacatctacattgggatttgatgttgtagcgtatttttctacaatattaataccatttttgatactatttatttctatacctttcgaaattagtaatttcaataagtctatatcgatgttatcagaacatagatattcgagtatatcaaaatcattgatatttttatagtcgactgacgacaataacaaaatcacaacatcgtttttgatattattatttttcttggtaacgtatgcctttaatggagtttcaccatcatactcatataatggatttgcaccactttctatcaatgattgtgcactgctggcatcgatgttaaatgttttacaactatcatagagtatcttatcgttaaccatgattggttgttgatgctatcgcattttttggtttctttcatttcagttatgtatggatttagcacgtttgggaagcatgagctcatatgatttcagtactgtagtgtcagtactattagtttcaataagatcaatctctagatctatagaatcaaaacacgataggtcagaagataatgaatatctgtaggcttcttgttgtactgtaacttctcgttttgttagatgtttgcatcgtgctttaacatcaatggtacaaattttatcctcgctttgtgtatcatattcgtccctactataaaattgtatattcagattatcatgagatgtgtatacgctaacggtatcaataaacggagcacaccatttagtcataaccgtaatccaaaaatttttaaagtatatcttaacgaaagaagttgtgtcattgtctacggtgtatggtactagatcctcataagtgtatatatctagagtaatgtttaatttatcaaatggttgataatatggatcctcatgacaatttccgaagatggaaatgagatatagacatgcaataaatctaattgcggacatggttactccttaaaaaaatacgaataatcaccttggctatttagtaagtgtcatttaacactatactcatattaatccatggactcataatctctatacgggattaacggatgttctatatacggggatgagtagttttcttctttaactttatactttttactaatcatatttagactgatgtatgggtaatagtgtttaaagagttcgttctcatcatcagaataaatcaatatctctgtttttttgttatacagatgtattacagcctcatatattacgtaatagaacgtgtcatctaccttattaactttcaccgcatagttgtttgcaaatacggttaatcctttgacctcgtcgatttccgaccaatctgggcgtataatgaatctaaactttaatttcttgtaatcattcgaaataatttttagtttgcatccgtagttatcccctttatgtaactgtaaatttctcaacgcgatatctccattaataatgatgtcgaattcgtgctgtatacccatactgaatggatgaacgaataccgacggcgttaatagtaatttactttttcatctttacatattgggtactagttttactatcataagtttataaattccacaagctactatggaataagccaaccatcttagtataacacacatgtcttaaagtttattaattaattacatgttgttttatatatcgctacgaatttaaacagagaaatcagtttaggaaaaaaaaatatctatctacatcatcacgtctctgtattctacgatagagtgctactttaagatgagacatatccgtgtcatcaaaaatatactccattaaaatgattattccggcagcgaacttgatattggatatatcacaacctttgttaatatctacgacaatagacagcagtcccatggttccataaacagtgagtttatctttctttgaagagatattttgtagagatcttataaaactgtcgaatgacatcgcatttatatctttagctaaatcgtatatgttaccatcgtaatatctaaccgcgtctatcttaaacgtttccatcgctttaaagacgtttccgatagatggtctcatttcatcagtcatactgagccaacaaatataatcgtgtataacatctttgatagaatcagactctaaagaaaacgaatcggctttattatacgcattcatgataaacttaatgaaaaatgtttttcgttgtttaagttggatgaatagtatgtcttaataattgttattatttcattaattaatatttagtaacgagtacactctataaaaacgagaatgacataactagttatcaaagtgtctaggacgcgtaattttcatatggtatagatcctgtaagcattgtctgtattctggagctattttctctatatctaatttctgaacgttcaccaatgtctctagccactttggcactaatagcgatcattcgcttagcgtcttctatattattaactggttgattcaatctatctagcaatggaccgtcggacagcgtcattctcatgttcttaatcaatgtacatacatcgccgtcatctaccaattcatccaacaacataagctttttaaaatcatcattataataggtttgatcgttgtcatttctccaaagaatatatctaataagtagagtcctcatgattagttaacaactattttttatgttaaatcaattagtacaccgctatgtttaatacttattcatattttagtttttaggattgagaatcaatacaaaaattaatgcatcattaattttagaaatacttagtttccacgtagtcaatgaaacatttgaactcatcgtacaggacgttctcgtacaggacgtaactataaaccggtttatatttgttcaagatagatacaaatccgataactttttttacgaattctacgggatccactttaaaagtgtcataccgggttctttttatttttttaaacagattaatggtgtgatgttgattaggtcttttacgaatttgatatagaatagcgtttacatattctccataatggtcaatcgccatttgttcgtatgtcataaattctttaattatatgacactgtgtattatttagttcatccttgttcatcattaggaatctatccaatatggcaattatactagaactataggtgcgttgtatacacatattgatgtgtctgtttatacaatccatgctactaccttcgggtaaaattgtagcatcatataccatttctagtactttaggttcattgttatccattgcagaggacgtcatgatcgcatcctaaaaaaatatattatttttatgttattttgttaaaaataatcatcgaatacgaatcatccagtccactgaatagcaaaatctttactattttggtatcttccaatgtggctgcctgatgtaatggaaattcattctctagaagatttttcaatgctccagcgttcaacaacgtacatactagacgcacgttattatcagctattgcataatacaaggcactatgtccatggacatccgccttaaatgcatctttgctagagagaaagcttttcagctgcttagacttccaagtattaattcgtgacagatccatgtctgaaacgagacgctaattagtgtataatttttgtcatattgcaccagaattaataatatctctaatagatctgattagtagatacatggctatcgcaaaacaacatatacacatttaataaaaataatatttattaagaaaattcagatttcacgtacccatcaatataaataaaataatgattccttacaccgtacccatattaaggagattctaccttacccataaacaatataaatccagtaatatcatgtctgatgatgaacacaaatggtgtattaaattccagtttttcaggagatgatctcgccgtagctaccataatagtagatgcctctgctacagttccttgttcgtcgacatctatctttgcattctgaaacattttataaatatataatgggtccctagtcatatgtttaaacgacgcattatctggattaaacatactaggagccatcatttcggctatcgacttaatatccctcttattttcgatagaaaatttagggagtttaagattgtacactttattccctaattgaaacgaccaatagtctaattttgcagccgtaatagaatctgtgaaatgggtcatattatcacctattgccaggtacatactaatattagcatccttatacggaaggcgtaccatgtcatattctttgtcatcgattgtgattgtatttccttgcaatttagtaactacgttcatcatgggaaccgttttcgtaccgtacttattagtaaaactagcattgcgtgttttagtgatatcaaacggatattgccatatacctttaaaatatatagtattaatgattgcccatagagtattattgtcgagcatattagaatctactacattagacataccggatctacgttctactatagaattaattttattaaccgcatctcgtctaaagtttaatctatataggccgaatctatgatattgttgataatacgacggtttaatacacacagtattatctacgaaactttgataagttagatcagtgtacgtatatttagatgttttcagcttagctaatcctgatattaattctgtaaatgctggacccagatctctttttctcaaatccatagtcttcaataattctattctagtattacctgatgcaggcaatagcgacataaacatagaaaacgaataaccaaacggtgagaagacaatattatcatcttgaatatttttatacgctactataccggcattggtaaatccttgtagacgataggtagacgctgaacacgttaacgatagtatcaataacgcaatcatgattttatggtattaataattaaccttatttttatgttcggtataaaaattattgatgtctacacatccttttgtaattgacatctatatatccttttgtataatcaactctaatcactttaacttttacagttttccctaccagtttatccctatattcaacatatctatccatatgcatcttaacactctctgccaagatagcttcagagtgaggatagtcaaaaagataaatatatagagcataatcattctcgtatactctgccctttattacatcgcccgcattgggcaacgaataacaaaatgcaagcatcttgttaacgggctcgtaaattgggataaaaattatgtttttatatctattttattcaagagaatattcaggaatttctttttccggttgtatctcatcgcagtatatatcatttgtacattgtttcatattttttaatagtttacaccttttagtaggactagtatcgtacaattcatagctgtattttgaattccaatcacgcataaaaatatcttctaattgttgacgaagacctaatccatcatccggtgtaatattaatagatgctccacatgtatccgtaaagtaatttcctgtccaatttgaggtacctatataggccgttttatcggttaccatatatttggcatggtttaccctagaatacggaatgggaggatcagcatctggtacaataaatagctttacttctatatttatgtttttagattttagcatagcgatagatcttaaaaagtttctcatgataaacgaagatcgttgccagcaactaatcaatagcttaacggatacttgtctgtctatagcggatcttcttaattcatcttctatataaggccaaaacaaaattttacccgccttcgaataaataatagggataaagttcataacagatacataaacgaatttactcgcatttctaatacatgacaataaagcggttaaatcattggttctttccatagtacatagttgttgcggtgcagaagcaataaatacagagtgtggaacaccacttacgttaatactaagaggatgatctgtattataatacgacggataaaagtttttccaattatatggtagattgttaactccaagataccagtatacctcaaaaatttgagtgagatccgctgccaagttcctattattgaagatcgcaatacccaattctttgacctgagttagtgatctccaatccatgttagcgcttcctaaataaatatgtgtattatcagatatccaaaattttgtatgaagaactcctcctaggatatttgtaatatctatgtatcgtacttcaactccggccatttgtagtctttcaacatcctttaatggtttgttagatttattgacggctactctaactcgtactcctcttttgggtaattgtacaatctcgtttaatattatcgtgccgaaattcgtacccacttcatccgataaactccaataaaaagatgatatatctagtgtttttgtggtattggatagaatttccctccacatgttaaatgtagacaaatatactttatcaaattgcatacctataggaatagtctctgtaatcactgcgattgtattatccggattcattttatttgttaaaagaataatcctatatcacttcactctattaaaaatccaagtttctatttctttcatgactgattttttaacttcatccgtttccttatgaagatgatgtttggcaccttcataaatttttatttctctattacaatttgcatgttgcatgaaataatatgcacctaaaacatcgctaatctcattgtttgttccctggagtatgagagtcggggtgttaatcttggaaattatttttctaaccttgttggtagccttcaagacctgactagcaaatccagccttaattttttcatgattgattaatgggtcgtattggtatttataaactttatccatatctctagatactgattctggacatagctttccgactggcgcatttggtgtgatggttcccataagtttggcagctagcagattcagtcttgaaacagcatctgcattaactagaggagacattagaatcattgctgtaaacaagtttggattatcgtaagaggctagtatagaaattgttgctcccatggaatgacccaataagtagatttaatagttaccacgtgctgtaccaaagtcatcaatcatcattttttcaccattacttcttccatgtccaatatgatcatgtgagaatactaaaattcctaacgatgatatgttttcagctagttcgtcataacgtccagaatgtttaccagctccatgacttatgaatactaatgccttaggatatgtaatcattgtccagattgaacatacagtttgcactcatgattcacgttatataactatcaatattaacagttcgtttgatgatcatattatttttatgttttattgataattgtaaaaacatacaattaaatcaatatagaggaaggagacggctactgtcttttgtgagatagtcatggcgactaaattagattatgaggatgctgttttttactttgtggatgatgataaaatatgtagtcgcgactccatcatcgatctaatagatgaatatattacgtggagaaatcatgttatagtgtttaacaaagatattaccagttgtggaagactgtacaaggaattgatgaagttcgatgatgtcgctatacggtactatggtattgataaaattaatgagattgtcgaagctatgagcgaaggagaccactacatcaattttacaaaagtccatgatcaggaaagtttattcgctaccataggaatatgtgctaaaatcactgaacattggggatacaaaaagatttcagaatctagattccaatcattgggaaacattacagatctgatgaccgacgataatataaacatcttgatactttttctagaaaaaaaattgaattgatgatataggggtcttcataacgcataattattacgttagcattctatatccgtgttaaaaaaaattatcctatcatgtatttgagagttttatatgtagcaaacatgatagctgtgatgccaataagctttagatattcacgcgtgctagtgttagggatggtattatctggtggtgaaatgtccgttatataatctacaaaacaatcatcgcatatagtatgcgatagtagagtaaacatttttatagtttttactggattcatacatcgtctacccaattcggttatgaatgaaattgtcgccaatcttacacccaaccccttgttatccattagtatagtattaacttcgttatttatgtcataaactgtaaatgattttgtagatgccatatcatacatgatattcatgtccctattataatcattactaactttatcacaatatatgttgataatatctatatatgatctagtctttgtgggcaactgtctatacaagtcgtctaaacgttgtttactcatatagtatcgaacagccatcattacatggtcccgttccgttgatagataatcgagtatgttagtggacttgtcaaatctatataccatattttctggaagtggatatacatagtcgtgatcaacattattgctagcctcatcttctatatcctgtactataccatctacataatctacgatattattacacataaacatcgacaacatactattgtttattatctaagtcctgttgatccaaacccttgatctcctctatttgtactatctagagattgtacttcttccagttctggataatatatacgttgatagattagctgagctattctatctccagtatttacattaaacgtacattttccattattaataagaatgactcctatgtttcccctataatcttcgtctattacaccacctcctatatcaatgccttttagtgacagaccagacctaggagctattctaccatagcaaatcttaggcatggacatactaatatctgtcttaattaactgtctttctcctggagggatagtataatcgtaagcgctatacaaatcatatccggcagcacccggcgattgcctagtaggagatttagctctgttagtttccttaacaaatctaactggtgagttaatattcatgttgaacataaaactaatattttatttcaaaattatttaccatcccatatattccatgaataagtgtgatgattgtacacttctatagtatctatatacgattcacgataaaatcctcctatcaatagcagtttattatccactatgatcaattctggattatccctcggataaataggatcatctatcagagtccatgtattgctggattcacaataaaattccgcatttctaccaaccaagaataaccttctaccgaacactaacgcgcatgatttataatgaggataataagtggatggtccaaactgccactgatcatgattgggtagcaaatattctgtagttgtatcagtttcagaatgtcctcccattacgtatataacattgtttatggatgccactgctggattacatctaggtttcagaagactcggcatattaacccaagcagcatccccgtggaaccaacgctcaacagatgtgggatttggtagacctcctactacgtataatttattgttagcgggtatcccgctagcatacagtctggggctattcatcggaggaattggaatccaattgtttgatatataatttacagctatagcattgttatgtatttcattgttcatccatccaccgatgagatatactacttctccaacatgagtacttgtacacatatggaatatatctataatttgatccatgttcataggatactctatgaatggatacttgtatgatttgcgtggttgtttatcacaatgaaatattttggtacagtctagtatccattttacattatttatacctctgggagaaagataatttgacctgattacatttttgataaggagtagcagatttcctaatttatttcttcgctttatataccacttaatgacaaaatcctcatctggaacatttagttcatcgctttctagaataagtttcatagatagataatcaaaattgtctatgatgtcatcttccagttccaaaaagtgtttggcaataaagtttttagtatgacataagagattggatagtccgtattctatacccatcatgtaacactcgacacaatattcctttctaaaatctcgtaggataaagtttatacaagtgtagatgataaattctacagaggttaatatagaagcacgtaataaattgacgacgttatgactatctatatatacctttccagtatatgagtaaataactatagaagttagactgtgaatgtcaaggtctagacaaaccctcgtaactggatctttatttttcgtgtatttttgacgtaaatgtgtgcgaaagtaaggagataactttttcaatatcgtagaattgactattatattgcctcctatggcatcaataattgttttgaatttcttagtcatagacaatgctaatatattcttacagtacacagtattgacaaatatcggcatttatgtttctttaaaagtcaacatctaaagaaaaatgattatcttcttgagacataactcccattttttggtattcacccacacgtttttcgaaaaaattagttttaccttctaatgatatattttccatgaaatcaaacggattggtaacattataaatttttttaaatcccaattcagaaatcaatctatccgcgacgaattctatatatgttttcatcatttcacaattcattcctataagtttaactggaagagccgcagtaagaaattcttgttcaatggataccgcatctgttataatagatctaacggtttcttcactcggtggatgcaataaatgtttaaacatcaaacatgcgaagtcgcagtgtagaccctcgtctctactaatcaattcgttggaaaacgtgagtccgggcattaggccacgctttttaagccaaaatatggaagcgaatgatccggaaaagaagattccttctactgcagcaaaggcaataagtctctctccataaccggcgctgtcatgtatccacttttgagcccaatcggccttcttttttacacaaggcatcgtttctatggcattaaagagatagtttttttcattactatctttaacataagtatcgatcaaaagactatacatttccgaatgaatgttttcaatggccatctgaaatccgtagaaacatctagcctcggtaatctgtacttctgtacaaaatcgttccgccaaattttcattcactattccgtcactggctgcaaaaaacgccaatacatgttttataaaatatttttcgtctggtgttagtttattccaatcattgatatctttagatatatctacttcttccactgtccaaaatgatgcctctgcctttttatacatgttccagatgtcatgatattggattgggaaaataacaaatctatttggatttggtgcaaggatgggttccataactaaattaacaataacaataaattttttttcagttatctatatgcctgtacttggatcttttgtacatcgatatcgccgcaatcactacaataattacaagtattattgatagcattgttattagtactatcataattaaattatcgttattatcattttgtaattgtgacatcatactagataaatcgtttgcgagattgttgtgggaagcgggcatggaggatgaattatcgttattattatttaaagcctcccattcggattcacaaatatggcgcgcgttcaacattttatggaaacagataacaagaaaactcgtcatcgttcaaatttttaacgatagtaaaccgattaaacgtcgagctaatttctaacgctagcgactctgttggatatgggtttccagatatatatcttttcagttcccctacgtatctataatcatctgtaggaaatggaagatatttccatttatctactgttcctaatatcatatgtggtggtgtagtagaaccattaagcgcgaaagatgttatttcgcatcgtattttaacttcgcaataatttctggttagataacgcactctaccagtcaagtcaatgatattagcctttacagatatattcatagtagtcgtaacgatgactccatcttttagatgcgatactcctttgtatgtaccagaatcttcgtacctcaaactcgatatatttaaacaagttaatgagatattaacgcgttttatgaatgatgatatataaccagaagttttatcctcggtggctagcgctataaccttatcattataataccaactagtgtgattaatatgtgacacgttagtgtgggtacaaatatgtacattatcgtctacgtcgtattcgatacatccgcatacagccaacaaatataaaatgacaaatactctaacgccgttcgtacccatcttgatgcggtttaataaatgttttgatttcaatttattgtaaaaaaagattcggttttatactgttcgatattctcattgcttatattttcatctatcatctccacacagtcaaatccgtggttagcatgcacctcatcaaccggtaaaagactatcggactcttctatcattataactctagaatatttaatttggtcattattaatcaagtcaattatcttatttttaacaaacgtgagtattttactcattttttataaaaacttttagaaatatacagactctatcgtgtgtctatatcttctttttatatccaatgtatttatgtctgatttttcttcatttatcatatataatggtccaaattctacacgtgcttcggattcatccagatcattaaggttcttataattgtaacatccttctcttccctcttctacatcttccttcttattcttattcttagcgtcacagaatctaccacagcaggatcccatgacgagcgtcatattaaactaatccattttcaattataatatacgattagtaatgaccattaaaataaaaatattcttcataaccggcaagaaagtgaaaagttcacattgaaactatgtcagtagtatacatcatgaaatgatgatatatatatactctattttggtggaggattatatgatataattcgtggataatcattcttaagacacatttcttcattcgtaaatcttttcacgttaaatgagtgtccatattttgcaatttcttcatatgatggcggtgtacgtggacgaggctgctcctgttcttgttgtagtcgccgactgtcgtgtctgcgtttagatccctccattatcgcgattgcgtagatggagtactattttataccttgtaattaaatttttttattaattaaacgtataaaaacgttccgtatctgtatttaagagccagatttcgtctaatagaacaaatagctacagtaaaaataactagaataattgctacacccactagaaaccacggatcgtaatacggcaatcggttttcgataataggtggaacgtatattttatttaaggacttaacaattgtctgtaaaccacaatttgcttccgcggatcctgtattaactatctgtaaaagcatatgttgaccgggcggagccgaacattctccgatatccaatttctgtatatctataatattattaacctccgcatacgcattacagttcttttctagcttggataccgcactaggtacatcgtctagatctattcctatttcctcagcgatagctcttctatccttttccggaagcaatgaaatcacttcaataaatgattcaaccatgagtgtgaaactaagtcgagaattactcatgcatttgttagttattcggagcgcgcaatttttaaactgtcctataacctctcctatatgaatagcacaagtgacattagtagggatagaatgttgagctaatttttgtaaataactatctataaaaagattatacaaagttttaaactctttagtttccgccatttatccagtctgagaaaatgtctctcataataaatttttccaagaaactaattgggtgaagaatggaaacctttaatctatatttatcacagtctgttttggtacacatgatgaattcttccaatgccgtactaaattcgatatctttttcgatttctggatatgtttttaataaagtatgaacaaagaaatggaaatcgtaataccagttatgtttaactttgaaattgttttttattttcttgttaatgattccagccacttgggaaaagtcaaagtcgtttaatgccgatttaatacgttcattaaaaacaaactttttatcctttagatgaattattattggttcattggaatcaaaaagtaagatattatcgggtttaagatctgcgtgtaaaaagttgtcgcagcatggtagttcgtaaattttaatgtataacagagccatctgtaaaaagataaactttatgtattgtaccaaagatttaaatcctaatttgatagctagctcggtatctactttatctgccgaatacagtgctaggggaaaaattataatatttcctctttcgtattcgtagttagttctcttttcatgttcgaaaaagtgaaacatgcggttaaaatagtttataacattaatattactgttaataactgccggataaaagtgggatagtaatttcacgaatttgatactgtcctttctctcgttaaacgcctttaaaaaaactttagaagaatatctcaatgatagttcctgaccatccatagtttgtatcaataatagcaacatatgaagaacacgtttatacagagtatgtaaaaatgttaatttatagtttaatcccatggcccacgcacacacgattaattttttttcatctccctttagattgttgtatagaaatttgggtactgtgaactccgccgtagtttccatgggactatataattttgtggcctcgaatacaaattttactacatagttatctatcttaaagactataccatatcctcctgtagatatgtgataaaaatcgtcgtttataggataaaatcgtttatccttttgttggaaaaaggatgaattaatgtaatcattctcttctatctttagtagtgtttccttattaaaattcttaaaataatttaacaatctaactgatggagcccaattttggtgtaaatctaattgggacattatattgttaaaatacaaacagtctcctaatataacagtatctgataatctatggggagacatccattgatattcaggggatgaatcattggcaacacccatttattgtacaaaaagccccaatttacaaacgaaagtccaggtttgatagagacaaactattaactattttgtctctgtttttaatttctttggtaatgaaattattcacaatatcagtatcttctttatctaccagagattttactaacttgataaccttggctgtctcattcaatagggtagtaatatttgtatgtgtgatattgatatcttttagaagtgattctttgatggtgccagcatacgaattacaataatgcagaaactcggttaacatgcaggaattatagtaagccaattccaattgttgcctgtgttgtattagagtgtcaatatgagcaatggtgtccttgcgtttctctgatagaatgcgagcagcgattttggcgttatcatttgacgatatttctggaatgacgaatcctgtttctactaactttttggtaggacaaagtgaaacaatcaagaagatagcttctcctcctatttgtggaagaaattgaactcctctagatgatctccttgacagatattggaccgaattacagaagtacctggaatgtaaagccctgaaaccccctcattttttaagcagattgttgccgtaaatcctgcactatgcccaagatagagagctcctttggtgaatccatctctatgtttcagtttaaccaagaaacagtcagctggtctaaaatttccatctctatctaatacagcatctaacttgatgtcaggaactatgaccggttatgttatatgtaacattgagtaaatccttaagttcataatcatcactgtcatcagttatgtacgatccaaacaatgtttctactggcatagtggatacgaagatgctatccatcagaatgtttccctgattagtattttctatatagctattcttctttaaacgattttccaaatcagtaactatgttcatttttttaggagtaggacgcctagccagtatggaagaggattttctagatcctctcttcaacatctttgatctcaatggaatgcaaaaccccatagtgtaacaaccaacgataaaaataatattgtttttcactttttataattttaccatctgactcatggattcattaatatctttataagagctactaacgtataattctttataactgaactgagatatatacaccggatctatggtttccataattgagtaaatgaatgctcggcaataactaatggcaaatgtataaaacaacgaaattatactagagttgttaaagttaatattttctatgagctgttccaataaattatttgttgtaactgcgttcaagtcataaatcatcttgatactatccagtaaaccgtttttaagttctggaatattattatcccattgtaaagcccctaattcgactatcgaatatcctgctctgatagcagtttcaatatcgacggacgtcaatactgtaataaaggtggtagtattgtcatcatcgtgataaactactggaatatggtcgttagtaggtacggtaactttacacaacgcgatatataactttccttttgtaccatttttaacgtagttgggacgtcctgcagggtattgttttgaagaaatgatatcgagaacagatttgatacgatatttgttggattcctgattatttactataatataatctagacagatagatgattcgataaatagagaaggtatatcgttggtaggataatacatccccattccagtattctcggatactctattaatgacactagttaagaacatgtcttctattctagaaaacgaaaacatcctacatggactcattaaaacttctaacgctcctgattgtgtctcgaatgcctcgtacaaggatttcaaggatgccatagattctttgaccaacgatttagaattgcgtttagcatctgatttttttattaaatcgaatggtcggctctctggtttgctaccccaatgataacaatagtcttgtaaagataaaccgcaagaaaatttatacgcatccatccaaataaccctagcaccatcggatgatattaatgtattattatagattttccatccacagttattgggccagtatactgttagcaacggtatatcgaatagattactcatgtaacctactagaatgatagttcgtgtactagtcataatatctttaatccaatctaagaaatttaaaattagattttttacactgttaaagttaacaaaggtattacccggatacgtggatatcatatatggtattggtccattatcagtaatagctccataaactgatacggcgatggtttttatatgtgtttgatctaacgaggaagaaattcgcgcccacaattcatctctagatatgtatttaatatcaaacggtaacacatcaatttcgggacgcgtatatgtttctaaatttttaatccaaatataatgatgacctatatgccctattatcatactgtcaactatagtacacctagagaacttacgatacatctgtttcctataatcgttaaattttacaaatctataacatgctaaaccttttgacgacaaccattcattaatttctgatatggaatctgtattctcaataccgtatcgttctaaagccagtgctatatctccctgttcgtgagaacgctttcgtataatatcgatcaacggataatctgaagtttttggagaataatatgactcatgatctatttcgtccataaacaatctagacataggaattggaggcgatgatcttaattttgtgcaatgagtcgtcaatcctataacttctaatattgtaatattcatcatcgacataacactatctatgttatcatcgtatattagtataccatgaccttcttcatttcgtgccaaaatgatatacagtcttaaatagttacgcaatatctcaatagtttcataattgttagctgttttcatcaaggtttgtatcctgtttaacatgatggcgttctatacgtttctattttttaaatttttaacgatttactgtggctagatacccaatctctctcaaatatttttttagcctcgcttacaagctgtttatctatactattaaaactgacgaatccgtgattttggtaatgggttccgtcgaaatttgccgaagtgatatgaacatattcgtcgtcgactatcaacaattttgtattattctgaatagtgaaaaccttcacagatagatcattttgaacacacaacgcgtctagacttctggcggttgccatagaatatacgtcgttcttatcccaattaccaactagaagtctgatcttaactcctctattaatggctgcttctataatggagttgtaaatgtcgggccaatagtagctattaccgtcgacacgtgtagtgggaactatggccaaatgttcaatatctatactagtcttagccgacttgagtttatcaataactacatcagtgtctagatctctagaatatcccaataggtgttccggagaatcagtaaagaacactccacctataggattcttaatatgatacgcagtgctaactggcagacaacaagccgcagagcataaattcaaccatgaattttttgcgctattaaaggctttaaaagtatcaaatcttctacgaagatctgtggccagcgggggataatcagaatatacacctaacgttttaatcgtatgtatagatcctccagtaaatgacgcgtttcctacataacatctttcattatctgacacccaaaaacaaccgagtagtagtcccacattattttttttatctatattaacggttataaaatttatatccgggcagtgactttgtagctctcccagatttcttttccctcgttcatctagcaaaactattattttaatccctttttcagatgcctcttttagtttatcaaaaataagcgctcccctagtcgtactcagaggattacaacaaaaagatgctatgtatatatatttcttagctagagtgataatttcgttaaaacattcaaatgttgttaaatgatcggatctaaaatccatattttctggtagtgtttctaccagcctacattttgctcccgcaggtaccggtgcaaatggccacatttagttaacataaaaacttatacatcctgttctatcaacgattctagaatatcatcggctatatcgctaaaattttcatcaaagtcgacatcacaacctaactcagtcaatatattaagaagttccatgatgtcatcttcgtctatttctatatccgtatccattgtagattgttgaccgattatcgagtttaaatcattactaatactcaatccttcagaatacaatctgtgtttcattgtaaatttataggcggtgtatttaagttggtagattttcaattatgtatcaatatagcaacagtagttcttgctcctccttgattctagcatcctcttcattattttcttctacgtacataaacatgtccaatacgttagacaacacaccgacgatggcggccgccacagacacgaatatgactaaaccgatgaccatttaaaaacccctctctagctttcacttaaactgtatcgattattcttttagaacatgtataatataaaaacattattctatttcgaatttaggcttccaaaaatttttcatccgtaaaccgataataatatatatagacttgttaatagtcggaataaatagattaatgcttaaactatcatcatctccacgattagagatacaatatttacattttttttgctgtttcgaaactttatcaatacacgttaatacaaacccaggaaggagatattgaaactgaggctgttgaaaatgaaacggtgaatacaataattcagataatgtaaaatcatgattccgtattctgatgatattagaactgctaatggatgtcgatggtatgtatctaggagtatctattttaacaaagcatcgatttgctaatatacaattatcattttgattaattgttattttattcatattcttaaaaggtttcatatttatcaattcttctacattaaaaatttccatttttaatttatgtagccccgcaatactcctcattacgtttcattttttgtctataatatccattttgttcatctcggtacatagattatccaattgagaagcgcatttagtagttttgtacattttaagtttattgacgaatcgtcgaaaactagttatagttaacattttattatttgataccctgatattaatacccctgccgttactattatttataactgatgtaatccacgtaacattggaattaactatcgatagtaatgcatcgacgcttccaaaattgtctattataaactcaccgataatttttttattacatgttttcatattcattaggattattaaatctttaatcttactacgattgtatgcgttgatattgcaagacgtcattctaaaagacggaggatctccatcaaatgccagacaatcacgtacaaagtacatggaaataggttttgttctattgcgcatcatagatttatatagaacacccgtagaaatactaatttgttttactctataaaatactaatgcatctatttcatcgttttgtataacgtctttccaagtgtcaaattccaaatttttttcattgatagtaccaaattcttctatctctttaactacttgcatagataggtaattacagtgatgcctacatgccgttttttgaaactgaatagatgcgtctagaagcgatgctacgctagtcacaatcaccactttcatatttagaatatatatatgtaaaaatatagtagaatttcattttgtttttttttctatgctataaatgaattctcattttgcatctgctcatactccgttttatatcaataccaaagaaggaagatatctggttctaaaagccgttaaagtatgcgatgttagaactgtagaatgcgaaggaagtaaagcttcctgcgtactcaaagtagataaaccctcatcacccgcgtgtgagagaagaccttcgtccccttccagatgcgagagaatgaataacccaggaaaacaagttccgtttatgaggacggacatgctacaaaatatgttcgcggctaatcgcgataatgtagcttctagacttttgtcctaaaatacaattatatccttttcgatattaataaatccgtgtcgtccaggttttttatctctttcagtatgtgaatagataggtattttatctctattcatcatcgaatttaagagatccgataaacattgtttgtattctccagatgtcagcatctgatacaacaatatatgtgcacataaacctctggcacttatttcatgtaccttccccttatcactaaggagaatagtatttgagaaatatgtatacatgatattatcatgaattagatatacagaatttgtaacactctcgaaatcacacgatgtgtcggcgttaagatctaatatatcactcgataacacattttcatctagatacactagacattttttaaagctaaaatagtctttagtagtaacagtaactatgcgattattttcatcgatgatacatttcatcggcatattattacgcttaccatcaaagactataccatgtgtatatctaacgtattctagcatggttgccatacgcgcattaaacttttcaggatctttggatagatcttccaatctatctatttgagaaaacatttttatcatgttcaatagttgaaacgtcggatccactatatagatattatctataaagattttaggaactacgttcatggtatcctggcgaatattaaaactatcaatgatatgattatcgttttcatcttttatcaccatatagtttctaagatatgggattttacttaatataatattatttcccgtaataaattttattagaaatgccaaatctataagaaaagtcctcgaattagtttgaagaatatctatatcgccgtaccgtatatttggattaattagatatagagaatatgatccgtaacatatacaacttttattatggcgtctaagatattcttccatcaacttattaacatttttgactagggaagatacattatgacgtcccattacttttgccttgtctattactgcgacgttcatagaatttagcatatctcttgccaattcttccattgatgttacattataagaaattttagatgaaattacatttggagctttaatagtaagaactcctaatatgtccgtgtatgtggtcactaatacagattgtagttctataatcgtaaataatttacctatattatatgtttgagtctgtttagaaaagtagctaagtatacgatcttttatttctgatgcagatgtatcaacatcggaaaaaaatctttttttattcttttttactaaagatacaaatatgtctttgttaaaaacagttattttctgaatatttctagcttgtaattttaacatatgatattcgttcacactaggtactctgcctaaataggtttctataatctttaatgtaatattaggaaaagtattctgatcaggattcctattcattttgaggatttaaaactctgattattgtctaatatggtctcaacacaaactttttcacagagcgatagagtttttgataactcgtttttcttaagaaatataaaactactgtctccagagctcgctctatcttttattttatttaattcgatacaaactcctgatactggttcagaaagtaattcattaattttcagtcctttatagaagatatttaatatagataatacaaaatcttcagtttttgatatcgatctgattgatcctagaactagatatattaataacgtgctcattaggcagtttatggcagcttgataattagatatagtatattccagttcatatttattagataccgcattgcccagattttgatattctatgaattcctctgaaaataaatccaaaataactagacattctattttttgtggattagtgtactctcttccctctatcatgttcactactggtgtccacgatgataaatatctagagggaatataatatagtccataggatgccaatctagcaatgtcgaataactgtaattttattcttcgctcttcattatgaattgattcttgaggtataaacctaacacaaattatattattagacttttcgtatgtaatgtctttcatgttataagtttttaatcctggaatagaatctattttaatgaggcttttaaacgcagagttctccaacgagtcaaagcataatactctgttggttttcttatatacgatgttacgattttcttctttgaatggaataggtttttgaattagtttataattacaacataatagataaggaagtgtgcaaatagtacgcggaaaaaacataatagctcccctgttttcatccatggttttaagtaaatgatcactggcttctttagtcaatggatattcgaacattaaccgtttcatcatcattggacagaatccatatttcttaatgtaaagagtgatcaaatcattgtgtttattgtaccatcttgttgtaaatgtgtattcggttatcggatctgctcctttttctattaaagtatcgatgtcgatctcgtctaagaattcaactatatcgacatatttcatttgtatacacataaccattactaacgtagaatgtataggaagagatgtaacgggaacagggtttgttgattcgcaaactattctaatacataattcttctgttaatacgtcttgcacgtaatctattatagatgccaagatatctatataattattttgtaagatgatgttaactatgtgatctatataagtagtgtaataattcatgtatttcgatatatgttccaactctgtctttgtgatgtctagtttcgtaatatctatagcatcctcaaaaaatatattcgcatatattcccaagtcttcagttctatcttctaaaaaatcttcaacgtatggaatataataatctattttacctcttctgatatcattaatgatatagtttttgacactatcttctgtcaattgattcttattcactatatctaagaaacggatagcgtccctaggacgaactactgccattaatatctctattatagcttctggacataattcatctattataccagaattaatgggaactattccgtatctatctaacatagttttaagaaagtcagaatctaagacctgatgttcatatattggttcatacatgaaatgatctctattgatgatagtgactatttcattctctgaaaattggtaactcattctatatatgctttccttgttgatgaaggatagaatatactcaatagaatttgtaccaacaaactgttctcttatgaatcgtatatcatcatctgaaataatcatgtaaggcatacatttaacaattagagacttgtctcctgttatcaatatactattcttgtgataatttatgtgtgaggcaaatttgtccacgttctttaattttgttatagtagatatcaaatccaatggagctacagttcttggcttaaacagatatagtttttctggaacgaattctacaacattattataaaggactttgggtagataagtgggatgaaatcctattttaattaatgcgatagccttgtcctcgtgcagatatccaaacgcttttgtgatagtatggcattcattgtctagaaacgctctacgaatatctgtgacagatatcatctttagagaatatactagtcgcgttaatagtactacaatttgtattttttaatctatctcaataaaaaaattaatatgtatgattcaatgtataactaaactactaactgttattgataactagaatcagaatctaatgatgacgtaaccaagaagtttatctactgccaatttagctgcattatttttagcatctcgtttagattttccatctgccttatcgaatactcttccgtcgatatctacacaggcataaaatgtaggagagttactaggccccactgattcaatacgaaaagaccaatctctcttagttatttggcagtactcattaataatggtgacagggttagcatctttccaatcaataatttttttagccggaataacatcatcaaaagacttatgatcctctctcattgatttttcgcgggatacatcatctattatggcgtcagccataacatcagcatccggcttatccgcctccgttgtcataaaccaacgaggaggaatatcgtcggagctgtacaccatagcactacgttgaagatcgtacagagctttattaacttctcgcttctccatattaagttgtctagttagttgtgcagcagtagctccttcgattccaatgtttttaatagccgcacacacaatctctgcgtcagaacgctcgtcaatatagatcttagacatttttagagagaactaacacaaccagcaataaaactaatttattttatcatttttttattcatcatcctctggtggttcgtcgtttctatcgaatgtggatctgattaacccgtcatctataggtgatgctggttctggagattctggaggagatggattattatctggaagaatctctgttatttccttgttttcatgtatcgattgcgttgtaacattaagattgcgaaatgctctaaatttgggaggcttaaagtgttgtttgcaatctctacacgcatgtctaactagtggaggttcgtcagcggctctagtttgaatcatcatcggcgtagtattcctacttttacagttaggacacggtgtattgtatttctcgtcgagaacgttaaaataatcgttgtaactcacatcctttattttatctatattgtattctactcctttcttaatgcattttataccgaataagagatagcgaaggaattctttttcggtgccgctagtacccttaatcatatcacatagtgttttatattccaaatttgtggcaatagacggtttatttctatacgatagtttgtttctggaatcctttgagtattctataccaatattattctttgattcgaatttagtttcttcgatattagattttgtattacctatattcttgatgtagtactttgatgatttttccatggcccattctattaagtcttccaagttggcatcatccacatattgtgatagtaattctcggatatcagtagcggctaccgccattgatgtttgttcattggatgagtaactactaatgtatacattttccatttataacacttatgtattaactttgttcatttatattttttcattattatgttgatattaacaaaagtgaatatatatgttaataattgtattgtggttatacggctacaatttcataatgagtggaagtcagtgtccgatgatcaatgacgatagctttactctgaaaagaaagtatcaaatcgatagtgcggagtcaacaataaaaatggataagaagaggataaagtttcagaatagagccaaaatggtaaaagaaataaatcagacaataagagcagcacaaactcattacgagacattgaaactaggatacataaaatttaagagaatgattaggactactactctagaagatatagcaccatctattccaaataatcagaaaacttataaactattctcggacatttcagccatcggcaaagcatcacagaatccgagtaagatggtatatgctctgctgctttacatgtttcccaatttgtttggagatgatcatagattcattcgttatagaatgcatccaatgagtaaaatcaaacacaagatcttctctcctttcaaacttaatcttattagaatattagtggaagaaagattctataataatgaatgcagatctaataaatggagaataattggaacacaagttgataaaatgttgatagctgaatctgataaatatacaatagatgcaaggtataacctaaaacccatgtatagaatcaagggaaaatctgaagaagataccctctttatcaaacagatggtagaacaatgtgtgacatcccaggaattggtggaaaaagtgttgaagatactgtttagagatttgttcaagagtggagaatacaaagcgtacagatacgatgatgatgtagaaaatggatttattggattggatacactaaaattaaacattgttcatgatatagttgaaccatgtatgcctgttcgtaggccagtggctaagatactgtgtaaagaaatggtaaataaatactttgagaatccgctacatattattggtaaaaatcttcaagagtgcattgactttgttagtgaataggcatttcatctttctccaatactaattcaaattgttaaattaataatggatagtataaatagttattagtgataaaatagtaaaaataattattagaataagagtgtagtatcatagataactctcttctataaaaatggattttattcgtagaaagtatcttatatacacagtagaaaataatatagattttttaaaggatgatacattaagtaaagtaaacaattttaccctcaatcatgtactagctctcaagtatctagttagcaattttcctcaacacgttattactaaggatgtattagctaataccaatttttttgttttcatacatatggtacgatgttgtaaagtgtacgaagcggttttacgacacgcatttgatgcacccacgttgtacgttaaagcattgactaagaattatttatcgtttagtaacgcaatacaatcgtacaaggaaaccgtgcataaactaacacaagatgaaaaatttttagaggttgccgaatacatggacgaattaggagaacttataggcgtaaattatgacttagttcttaatccattatttcacggaggggaacccatcaaagatatggaaatcatttttttaaaactgtttaagaaaacagacttcaaagttgttaaaaaattaagtgttataagattacttatttgggcttacctaagcaagaaagatacaggcatagagtttgcggataatgatagacaagatatatacactctatttcaacaaactggtagaatagtccatagcaatctaacagaaacgtttagagattatatctttcccggagataagactagctattgggtgtggttaaacgaaagtatagctaatgatgcggatattgttcttaatagacacgccattaccatgtatgataaaattcttagttatatatactctgagataaaacaaggacgcgttaataaaaacatgcttaagttagtttatatctttgagcctgaaaaagatatcagagaacttctgctagaaatcatatatgatattcctggagatatcctatctattattgatgcaaaaaacgacgattggaaaaaatattttattagtttttataaagctaattttattaacggtaatacatttattagtgatagaacgtttaacgaggacttattcagagttgttgttcaaatagatcccgaatatttcgataatgaacgaattatgtctttattctctacgagtgctgcggacattaaacgatttgatgagttagatattaataacagttatatatctaatataatttatgaggtgaacgatatcacattagatacaatggatgatatgaagaagtgtcaaatctttaacgaggatacgtcgtattatgttaaggaatacaatacatacctgtttttgcacgagtcggatcccatggtcatagagaacggaatactaaagaaactgtcatctataaaatccaagagtagacggctgaacttgtttagcaaaaacattttaaaatattatttagacggacaattggctcgtctaggtcttgtgttagatgattataaaggagacttgttagttaaaatgataaaccatcttaagtctgtggaggatgtatccgcattcgttcgattttctacagataaaaaccctagtattcttccatcgctaatcaaaactattttagctagttataatatttccatcatcgtcttatttcaaaggtttttgagagataatctatatcatgtagaagaattcttggataaaagcatccatctaaccaagacggataagaaatatatacttcaattgataagacacggtagatcatagaacagaccaaatatattattaataatttgtatatacatagatataattatcacacatttttgataaatgggaactgctgcaacaattcagactcccaccaaattaatgaataaagaaaatgcagaaatgattttggaaaaaattgttgatcatatagttatgtatattagtgacgaatcaagtgattcagaaaataatcctgaatatattgattttcgtaacagatacgaagactatagatctctcattataaaaagtgatcacgagtttgtaaagctatgtaaaaatcatgcagagaaaagttctccagaaacgcaacaaatgattatcaaacacatatacgaacaatatcttattccagtatctgaagtactattaaaacctataatgtccatgggtgacataattacatataacggatgtaaagacaatgaatggatgctagaacaactctctaccctaaactttaacaatctccgcacatggaactcatgtagcataggcaatgtaacgcgtctgttttatacattttttagttatctgatgaaagataaactaaatatataagtataatcccattctaatactttaacctgatgtattacctgcatcttattagaatattaacctaactaaaagacataacatagttgataaaaagcggtaggatataaatattatggctgccaccgttccgcgttttgacgacgtgtacaaaaatgcacaaagaagaattctagatcaagaaacattttttagtagaggtctaagtagaccgttaatgaaaaacacatatctatttgataattacgcgtatggatggataccagaaactgcaatttggagtagtagatacgcaaacttagatgcaagtgactattatcccatttcgttgggattacttaaaaagttcgagtttctcatgtctctatataaaggtcctattcccgtatatgaagaaaaagtaaatactgaattcattgctaatggatcgttctctggtagatacgtatcatatcttcgaaagttttctgcccttccaacaaacgagtttattagttttttgttactgacttccattccaatctataatatcttgttctggtttaaaaatactcagtttgatattactaaacacacattattcagatacgtctatacagataatgccaaacacctggcgttggctaggtatatgcatcaaacaggagactataagcctttgtttagtcgtctcaaagagaattatatatttaccggtcccgttccaataagtatcaaagatatagatcaccctaatcttagtagagcaagaagtccatccgattatgagacattagctaatattagtactatattgtactttaccaagtatgatccggtattaatgtttttattgttttacgtacctgggtattcaattactacaaaaattactccagccgtagaatatctaatggataaactgaatctaacaaagagcgacgtacaactgttgtaaattattttatgcttcgtaaaatgtaggttttgaaccaaacattctttcaaagaatgagatgcataaaactttattatccaatagattgactatttcggacgtcaatcgtttaaagtaaacttcgtaaaatattctttgatcactgccgagtttaaaacttctatcgataattgtttcatatgttttaatatttacaagttttttggtccatggtacattagccggacaaatatatgcaaaataatatcgttctccaagttctatagtttctggattatttttattatattcagtaaccaaatacatattagggttatctgcggatttataatttgagtgatgcattcgactcaacataaataattctagaggagacgatctactatcaaattcggatcgtaaatctgtttctaaagaacggagaatatctatacatacctgattagaattcatccgtccttcagacaacatctcagacagtctggtcttgtatgtcttaatcatattcttatgaaacttggaaacatctcttctagtttcactagtacctttattaattctctcaggtacagattttgaattcgacgatgctgagtatttcatcgttgtatatttcttcttcgattgcataatcagattcttatataccgcctcaaactctattttaaaattattaaacaatactctattattaatcagtcgttctaactctttcgctatttctatagacttatcgacatcttgactgtctatctctgtaaacacggagtcggtatctccatacacgctacgaaaacgaaatctgtaatctataggcaacgatgttttcacaatcggattaatatctctatcgtccatataaaatggattacttaatggattggcaaaccgtaacataccgttagataactctgctccatttagtaccgattctagatacaagatcattctacgtcctatggatgtgcaactcttagccgaagcgtatgagtatagagcactatttctaaatcccatcagaccatatactgagttggctactatcttgtacgtatattgcatggaatcatagatggccttttcagttgaactggtagcctgttttagcatctttttatatctggctctctctgccaaaaatgttcttaatagtctaggaatggttccttctatcgatctatcgaaaattgctatttcagagatgaggttcggtagtctaggttcacaatgaaccgtaatatatctaggaggtggatatttctgaagcaagagctgattatttatttcttcttccaatctattggtactaacaacgacaccgactaatgtttccggagatagatttccaaagatacacacattaggatacagactgttataatcaaagattaatacattattactaaacattttttgttttggagcaaataccttaccgccttcataaggaaacttttgttttgtttctgatctaactaagatagttttagtttccaacaatagctttaacagtggacccttgatgactgtactcgctctatattcgaataccatggattgaggaagcacatatgttgacgcacccgcgtctgtttttgtttctactccataatactcccacaaatactgacacaaacaagcatcatgaatacagtatctagccatatctaaagctatgtttagattataatccttatacatctgagctaaatcaacgtcatcctttccgaaagataatttatatgtatcattaggtaaagtaggacatgatagtacgactttaaatccattttcccaaatatctttacgaattactttacatataatatcctcatcaacagtcacataattacctgtggttaaaacctttgcaaatgcagcggctttgcctttcgcgtccgtagtatcgtcaccgatgaacgtcatttctctaactcctctatttaatactttacccatgcaactgaacgcgttcttggatatagaatccaatttgtacgaatccaatttttcagatttttgaatgaatgaatatagatcgaaaaatatagttccattattgttattaacgtgaaacgtagtattggccatgccgcctactcccttatgactagactgatttctctcataaatacagagatgtacagcttcctttttgtccggagatctaaagataatcttctctcctgttaataactctagacgattagtaatatatctcagatcaaagttatgtccgttaaaggtaacgacgtagtcgaacgttagttccaacaattgtttagctattcgtaacaaaactatttcagaacatagaactagttctcgttcgtaatccatttccattagtgactgtatcctcaaacatcctctatcgacggcttcttgtatttcctgttccgttaacatctcttcattaatgagcgtaaacaataatcgtttaccacttaaatcgatataacagtaacttgtatgcgagattgggttaataaatacagaaggaaacttcttatcgaagtgacactctatatctagaaataagtacgatcttgggatatcgaatctaggtatttttttagcgaaacagttacgtggatcgtcacaatgataacatccattgttaatctttgtcaaatattgctcgtccaacgagtaacatccgtctggagatatcccgttagaaatataaaaccaactaatattgagaaattcatccatggtggcattttgtatgctgcgtttctttggctcttctatcaaccacatatctgcgacggagcattttctatctttaatatctagattataacttattgtctcgtcaatgtctatagttctcatctttcccaacggcctcgcattaaatggaggaggagacaatgactgatatatttcgtccgtaactacgtaataaaagtaatgaggaaatcgtataaatacggtctcgccatttcgacatctggatttcagatataaaaatctgttttcaccgtgactttcaaaccaattaatgcaccgaacatccatttatagaatttagaaatatattttcatttaaatgaatcccaaacattggggaagagccgtatggaccattatttttatagtactttcgcaagcgggtttagacggcaacatagaagcgtgtaaacgaaaactatatactatagtcagcactcttccatgtcctgcatgtagacggcacgcgactatcgctatagaggacaataatgtcatgtctagcgatgatctgaattatatttattattttttcatcagattatttaacaatttggcatctgatcccaaatacgcgatcgatgtgacaaaggttaaccctttataaacttaacccattataaaacttatgattagtcacgactgaaataaccgcgtgattattttttggtataattctacacggcatggtttctgtaactatgaattcaacccccgttacattagtgaaatctttaacaaacagcaagggttcgtcaaagacataaaactcattgtttacaatcgaaatagaccccctatcacacttaaaataaaaaatatccttatcctttaccaccaaataaaattctgattggtcaatgtgaatgtattcacttaacagttccacaaatttatttattaactccgaggcacatacatcgtcggtattttttatggcaaactttactcttccagcatccgtttctaaaaaaatattaacgagttccatttatatcatccaatattattgaaatgacgttgatggacagatgatacaaataagaaggtacggtacctttgtccaccatctcctccaattcatgctctattttgtcattaactttaatgtatgaaaacagtacgccacatgcttccatgacagtgtgtaacactttggatacaaaatgtttgacattagtataattgtccaagactgtcaatctataatagatagtagctataatatattctatgatggtattgaagaagatgacaatcttggcatattgatcatttaacacagacatggtatcaacagatagcttgaatgaaagagaatcagtaattggaataagcgtcttctcgatagagtgtccgtataccaacatgtctgatattttgatgtattccattaaattatttagttttttctttttattctcgttaaacagcatttctgtcaacggaccccaacatcgttgaccgattaagttttgattgatttttccgtgtaaggcgtatctagtcagatcgtatagcctatccaataatccatcatctgtgcgtagatcacatcgtacactttttaattctctatagaagagcgacagacagcaatttctttattctctacagatgtaagatacttgaagacattcctatgatgatgcagaattttggataacacggtattgatggtatctgttaccataattcctttgatggctgatagtgtcagagcacaagatttccaatctttgttttgatatctatatcagacagcatggtgcgtctgacaacacaaggattaagacggaaagatgaaatgattctctcaacatcttcaatggataccttgctattttttctggcattatctatatgtgcgagaatatcctctagagaatcagtatcctttttgatgatagtggatctcaatgacatgggacgtctaaaccttcttattctatcaccagattgcatggtgatttgtcttctttcttttatcataatgtaatctctaaattcatcggcaaattgtctatatctaaaatcataatatgagatgtttacctctacaaatatctgttcgtccaatgttagagtatctacatcagttttgtattccaaattaaacatggcaacggatttaattttatattcctctattaagtcctcgtcgataataacagaatgtagataatcatttaatccatcgtacatggttggaagatgcttgttgacaaaatctttaattgtcttgatgaaggtgggactatatctaacatcttgattaataaaatttataacattgtccataggatactttgtaactagttttatacacatctcttcatcggtaagtttagacagaatatcgtgaacaggtggtatattatattcatcagatatacgaagaacaatgtccaaatctatattgtttaatatattatatagatgtagcgtagctcctacaggaatatctttaactaagtcaatgatttcatcaaccgttagatctattttaaagttaatcatataggcattgatttttaaaaggtatgtagccttgactacattctcattaattaaccattccaagtcactgtgtgtaagaagattatattctatcataagcttgactacatttggtcccgataccattaaagaattcttatgatataaggaaacagattttaggtactcatctactctacaagaattttggagagccttaacgatatcagtgacgtttattatttcaggaggaaagaatctaacattgagaatatcggaattaatagcttccagatacagtgattttggcaatagtccgtgtaatccataatccagtaacacgagctggtgcttgctagacaccttttcaatgtttaatttttttgaaataagctttgataaagccttcctcgcaaattccggatacatgaacatgtcggcgacatgattaagtattgttttttcattattttctcaacaagttctcaataccccaatagatgatagaatatcacccaatgcgtccatgttgtctatttccaacaggtcgctatatccaccaatagaagtttttccaaaaaagattctaggaacagttctaccaccagtaatttgttcaaaatagtcacgcaattcattttcgggtttaaattctttaatatcgacaatttcatacgctcctcttttgaaactaaacttatttagaatatccagtgcatttctacaaaaaggacatgtatacttgacaaaaattgtcactttgttattggccaacctttgttgtacaaattcctcggccattttaatatttaagtgatataaaactatctcgacttatttaactctttagtcgagatatatggacgcagatagctatatgatagccaactacagaaggcaaacgctataaaaaacataattacgacgagcatatttataaatatttttattcagcattacttgatatagtaatattaggcacagtcaaacattcaaccactctcgatacattaactctctcattttctttaacaaattctacaatatcttcgtaaaaagattcttgaaactttttagaatatctatcgactctagatgaaatagcgttcgtcaacatactatgttttgtatacataaaggcgcccattttaacagtttctagtgacaaaatgctagcgatcctaggatcctttagaatcacatagattgacgattcgtctctcttagtaactctagtaaaataatcatacaatctagtacgcgaaataatattatccttgacttgaggagatctaaacaatctagttttgagaacatcgataagttcatcgggaatgacatacatactatctttaatagaactcttttcatccagttgaatggattcgtccttaaccaactgattaatgagatcttctattttatcattttccagatgatatgtatgtccattaaagttaaattgtgtagcgcttctttttagtctagcagccaatactttaacatcactaatatcgatatacaaaggagatgatttatctatggtattaagaattcgtttttcgacatctgtcaaaaccaattcctttttgcctgtatcatccagttttccatcctttgtaaagaaattattttctactagactattaataagactgataaggattcctccataattgcacaatccaaactttttaacaaaactagactttacaagatctacaggaatgcgtaattcaggtttcttagcttgtgattttttcttttgtggacattttcttgtgaccaactcatctaccatttcattgattttagcagtgaaataagctttcaatgcacgggcactgatactattgaaaacgagttgatcttcaaattccgccatttaagttcaccaaacaacttttaaatacaaatatatcaatagtagtagaataagaactataaaaaaaataataattaaccaataccaaccccaacaaccggtattattagttgatgtgactgttttctcatcacttagaacagatttaacaatttctataaagtctgtcaaatcatcttccggagaccccataaatacaccaaatatagcggcgtacaacttatccatttatacattgaatattggcttttctttatcgctatcttcatcatattcatcatcaatatcaacaagtcccagattacgagccagatcttcttctacattttcagtcattgatacacgttcactatctccagagagtccgataacgttagccaccacttctctatcaatgattagtttcttgagtgcgaatgtaatttttgtttccgttccggatctatagaagacgataggtgtgataattgccttggccaattgtctttctcttttactgagtgattctagttcaccttctatagatctgagaatggatgattctccagtcgaaacatattctaccatggatccgtttaatttgttgatgaagatggattcatccttaaatgttttctctgtaatagtttccaccgaaagactatgcaaagaatttggaatgcgttccttgtgcttaatgtttccatagacggcttctagaagttgatacaacataggactagccgcggtaacttttatttttagaaagtatccatcgcttctatcttgtttagatttatttttataaagtttagtctctccttccaacataataaaagtggaagtcatttgactagataaactatcagtaagttttatagagatagacgaacaattagcgtattgagaagcatttagtgtaacgtattcgatacattttgcattagatttactaatcgattttgcatactctataacacccgcacaagtctgtagagaatcgctagatgcagtaggtcttggtgaagtttcaactctcttcttgattaccttactcatgattaaacctaaataattgtactttgtaatataatgatatatattttcactttatctcatttgagaataaaaatgtttttgtttaaccactgcatgatgtacagatttcggaatcgcaaaccaccagtggttttattttatccttgtccaatgtgaattgaatgggagcggatgcgggtttcgtacgtagatagtacattcccgtttttagaccgagactccatccgtaaaaatgcatactcgttagtttggaataactcggatctgctatatggatattcatagattgactttgatcgatgaaggctcccctgtctgcagccatttttatgatcgtcttttgtggaatttcccaaatagttttataaactcgcttaatatcttctggaaggtttgtattctgaatggatccaccatctgccataatcctattcttgatctcatcattccataattttctctcggttaaaactctaaggagatgcggattaactacttgaaattctccagacaatactctccgagtgtaaatattactggtatacggttccaccgactcattatttcccaaaatttgagcagttgatgcagtcggcataggtgccaccaataaactatttctaagaccgtatgttctgattttatcttttagaggttcccaattccaaagatccgacggtacaacattccaaagatcatattgtagaataccgttactggcgtacgatcctacatatgtatcgtatggtccttccttctcagctagttcacaactcgcctctaatgcaccgtaataaatggtttcgaagatcttcttatttagatcttgtgcttccaggctatcaaatggataatttaagagaataaacgcgtccgctaatccttgaacaccaataccgataggtctatgtctcttattagagatttcagcttctggaataggataataattaatatctataattttattgagatttctgacaattactttgaccacatccttcagtttgagaaaatcaaatcgcccatctattacaaacatgttcaaggcaacagatgccagattacaaacggctacctcattagcatccgcatattgtattatctcagtgcaaagattactacacttgatagttcctaaattttgttgattactctttttgttacacgcatccttataaagaatgaatggagtaccagtttcaatctgagattctataatcgctttccagacgactcgagcctttattatagatttgtatctcctttctctttcgtatagtgtatacaatcgttcgaactcgtctccccaaacattgtccaatccaggacattcatccggacacatcaacgaccactctccgtcatccttcactcgtttcataaagagatcaggaatccaaagagctataaatagatctctggttctatgttcctcgtttcctgtattctttttaagatcgaggaacgccataatatcagaatgccacggttccaagtatatggccataactccaggccgtttgtttcctccctgatctatgtatctagcggtgttattataaactctcaacattggaataataccgtttgatataccattggtaccggagatatagcttccactggcacgaatattactaattgatagacctattccccctgccattttagagattaatgcgcatcgttttaacgtgtcatagataccctctatgctatcatcgatcatgttaagtagaaaacagctagacatttggtgacgactagttcccgcattaaataaggtaggagaagcgtgcgtaaaccatttttcagaaagtagattgtacgtctcaatagctgagtctatatcccattgatgaattcctactgcgacacgcattaacatgtgctgaggtctttcaacgatcttgttgtttattttcaacaagtaggatttttccaaagttttaaaaccaaaatagttgtatgaaaagtctcgttcgtaaataataaccgagttgagtttatccttatatttgttaactatatccatggtgatacttgaaataatcggagaatgtttcccatttttaggattaacatagttgaataaatcctccatcacttcactaaatagtttttttgtttccttgtgtagatttgatacggctattctggcggctagaatggcataatccggatgttgtgtagtacaagtggctgctatttcggctgccagagtgtccaattctaccgttgttactccattatatattccttgaataaccttcatagctattttaataggatctatatgatccgtgtttaagccataacataattttctaatacgagacgtgattttatcaaacatgacattttccttgtatccatttcgtttaatgacaaacatttttgttggtgtaataaaaaaaattatttaacttttcattaatagggatttgacgtatgtagcgtacaaaattatcgttcctggtatatagataaagagtcctatatatttgaaaatcgttacggctcgattaaactttaatgattgcatagtgaatatatcattaggatttaactccttgactatcatggcggcgccagaaattaccatcaaaagcattaatacagttatgccgatcgcagttagaacggttatagcatccaccatttatatctaaaaattagatcaaagaatatgtgacaaagtcctagttgtatactgagaattgacgaaacaatgtttcttacatattttttttttattagtaaccgacttaatagtaggaactggaaaactagacttgattattctataagtatagatacccttccaaataatattctctttgataaaagttccagaaaatgtagaattttttaaaaagttatcttttgctattaccaagattgtgtttagacgcttattattaatatgagtgatgaaatccacaccgcctctagatatcgcttttatttccacattagatggtaaatccaatagtgaaactatctttttaggaatgtatggactcgcgtttagaggagtgaacgtcttaggcgtcggaaaggatgattcatcaaacgaataaacaatttcacaaatggatgttaatgtattagtaggaaattttttgacgctagtggaattgaagattctaatggatgatgttctacctatttcatccgataacatgttaatttccgacaccaacggttttaatatttcgatgatatacggtagtctctctttcggacttatatagcttattccacaatacgagtcattatatactccaaaaaacaaaataactagtataaaatctgtatcgaatgggaaaaacgaaattatcgacataggtatagaatctggaacattgaacgtattaatacttaattctttttctgtggtaagtaccgataggttattgacattgtatggttttaaatattctataacttgagacttgatagatattagtgatgaattgaaaattatttttatcaccacgtgtgtttcaggatcatcgtcgacgcccgtcaaccaaccgaatggagtaaaataaatatcattaatatatgctctagatattagtatttttatcaatcctttgattatcatcttctcgtaggcgaatgattccatgatcaagagtgatttaagaacatcctccggagtattaatgggcttagtaaacagtccatcgttgcaataataaaagttatccaagttaaaggatattatgcattcgtttaaagatatcacctcatctgacggagacaattttttggtaggttttagagactttgaagctacttgtttaacaaagttattcatcgtcgtttactattctatttaattttgtagttaatttatcacatatcacattaattgactttttggtccatttttccatacgtttatattcttttaatcctgcgttatccgtttccgttatatccagggatagatcttgcaagttaaatagaatgctcttaaataatgtcattttcttatccgctaaaaatttaaagaatgtataaacctttttcagagatttgaaactcttaggtggtgtcctagtacacaatatcataaacaaactaataaacattccacattcagattccaacagctgattaacttctacattaatacagcctattttcgctccaaatgtacattcgaaaaatctgaataaaacatcgatgtcacaatttgtattatccaatacagaatgtttgtgattcgtgttaaaaccatcggagaaggaataaaaataaaaattattatagtggtggaattcagttggaatattgcctccggagtcataaaaggatactaaacattgttttttatcataaattacacatttccaatgagacaaataacaaaatccaaacattacaaatctagaggtagaacttttaattttgtctttaagtatatacgataagatatgtttattcataaacgcgtcaaatttttcatgaatcgctaaggagtttaagaatctcatgtcaaattgtcctatataatccacttcggatccataagcaaactgagagactaagttcttaatacttcgattgctcatccaggctcctctctcaggctctattttcatcttgacgacctttggattttcaccagtatgtattcctttacgtgataaatcatcgattttcaaatccatttgtgagaagtctatcgccttagatactttttcccgtagtcgaggtttaaagaaatacgctaacggtatactagtaggtaactcaaagacatcatatatagaatggtaacgcgtctttaactcgtcggttaactctttcttttgatcgagttcgtcgctactattgggtctgctcaggtgccccgactctactagttccaacatcataccgataggaatacaagacactttgccggcggttgtagatttatcatatttctccactacatatccgttacaatttgttaaaaatttagatacatctatattgctacataatccagctagtgaatatatatgacataataaattggtaaatcctagttctggtattttactaattactaaatctgtatatctttccatttatcatggaaaagaatttaccagatatcttcttttttccaaactgcgttaatgtattctcttacaaatattcacaagatgaattcagtaatatgagtaaaacggaacgtgatagtttctcattggcggtgtttccagttataaaacatagatggcataacgcacacgttgtaaaacataaaggaatatacaaagttagtacagaagcacgtggaaaaaaagtatctcctccatcactaggaaaacccgcacacataaacctaaccgcgaagcaatatatatacagtgaacacacaataagctttgaatgttatagttttctaaaatgtataacaaatacagaaatcaattcgttcgatgagtatatattaagaggactattagaagctggtaatagtttacagatattttccaattccgtaggtaaacgaacagatactataggtgtactagggaataagtatccatttagcaaaattccattggcctcattaactcctaaagcacaacgagagatattttcagcgtggatttctcatagacctgtagttttaactggaggaactggagtgggtaagacgtcacaggtacccaagttattgctttggtttaattatttatttggtggattctctactctagataaaatcactgactttcacgaaagaccagtcattctatctcttcctaggatagctttagttagattgcatagcaataccattttaaaatcattgggatttaaggtactagatggatctcctatttctttacggtacggatctataccggaagaattaataaacaaacaaccaaaaaaatatggaattgtattttctacccataagttatctctaacaaaactatttagttatggcactcttattatagacgaagttcatgagcatgatcaaataggagatattattatagcagtagcgagaaagcatcatacgaaaatagattctatgtttttaatgactgccacgttagaggatgacagggaacggctaaaagtatttttacctaatcccgcatttatacatattcctggagatacactgtttaaaattagcgaggtatttattcataataagataaatccatcttccagaatggcatacatagaagaagaaaagagaaatttagttactgctatacagatgtatactcctcctgatggatcatccggtatagtctttgtggcatccgttgcacagtgtcacgaatataaatcatatttagaaaaaagattaccgtatgatatgtatattattcatggtaaggtcttagatatagacgaaatattagaaaaagtgtattcatcacctaatgtatcgataattatttctactccttatttggaatccagcgttactatacgcaatgttacacacatttatgatatgggtagagtttttgtccccgctccttttggaggatcgcaagaatttatttctaaatctatgagagatcaacgaaaaggaagagtaggaagagttaatcctgggacatacgtatatttctatgatctgtcttatatgaagtctatacagcgaatagattcagaatttctacataattatatattgtacgctaataagtttaatctaacactccccgaagatttgtttataatccctacaaatttggatattctatggcgtacaaaggaatatatagactcgttcgatattagtacagaaacatggaataaattattatccaattattatatgaagatgatagagtatgctaaactttatgtactaagtcctattctcgctgaggagttggataattttgagaggacgggagaattaactagtattgtacaagaagccattttatctctaaatttacgaattaagattttaaattttaaacataaagatgatgatacgtatatacacttttgtaaaatattattcggtgtctataacggaacaaacgctactatatattatcatagacctctaacgggatatatgaatatgatttcagatactatatttgttcctgtagataataactaaaaatcaaactctaatgaccacatctttttttagagatgaaaaattttccacatctccttttgtagacacgactaaacattttgcagaaaaaagtttattagtgtttagataatcgtatacttcatcagtgtagatagtaaatgtgaacagataaaaggtattcttgctcaatagattggtaaattccatagaatatattaatcctttcttcttgagatcccacatcatttcaaccagagacgttttatccaatgatttacctcgtactataccacatacaaaactagattttgcagtgacgtcgtatctggtattcctaccaaacaaaattttacttttagttcttttagaaaattctaaggtagaatctctatttgccaatatgtcatctatggaattaccactagcaaaaaatgatagaaatatatattgatacatcgcagctggttttgatctactatactttaaaaacgaatcagattccataattgcctgtatatcatcagctgaaaaactatgttttacacgtattccttcggcatttctttttaatgatatatcttgtttagacaatgataaagttatcatgtccatgagagacgcgtctccgtatcgtataaatatttcattagatgttagacgcttcattaggggtatacttctataaggtttcttaatcagtccatcattggttgcgtcaagaactactatcggatgttgttgggtatctctagtgttacacatggccttactaaagtttgggtaaataactatgatatctctattaattatagatgcatatatttcatttgtcaaggatattagtatcgacttgctatcgtcattaatacgtgtaatgtaatcatataaatcatgcgatagccaaggaaaatttaaatagatgttcatcatataatcgtcgctataattcatattaatacgttgacattgactaatttgtaatatagcctcgccacgaagaaagctctcgtattcagtttcatcgataaaggataccgttaaatataactggttgccgatagtctcatagtctattaagtggtaagtttcgtacaaatacagaatccctaaaatattatctaatgttggattaatctttaccataactgtataaaatggagacggagtcataactattttaccgtttgtacttactggaatagacgaaggaataatctccggacatgctggtaaagacccaaatgtctgtttgaagaaatccaatgttccaggtcctaatctcttaacaaaaattacgatattcgatcccgatatcctttgcattctatttaccagcatatcacgaactatattaagattatctatcatgtctattctcccaccgttatataaatcgcctccgctaagaaacgttagtatatccatacaatggaatacttcatttctaaaatagtattcgttttctaattctttaatgtgaaatcgtatactagaaagggaaaaattatctttgagttttccgttagaaaagaaccacgaaactaatgttctgattgcgtccgattccgttgctgaattaatggatttacaccaaaaactcatataacttctagatgtagaagcattcgctaaaaaattagtagaatcaaaggatataagtagatgttccaacaagtgagcaattcccaagatttcatctatatcattctcgaatccgaaattagaaattcccaagtagatatcctttttcatccgatcgttgatgaaaatacgaactttattcggtaagacaatcatttactaaggagtaaaataggaagtaatgttcgtatgtcgttatcatcgtataaattaaaggtgtgttttttaccattaagtgacattataattttaccaatattggaattataatataggtgtatttgcgcactcgcgacggttgatgcatcggtaaatatagctgtatctaatgttctagtcggtatttcatcatttcgctgtctaataatagcgttttctctatctgtttccattacagctgcctgaagtttattggtcggataatatgtaaaataataagaaatacatacgaataacaaaaataaaataagatataataaagatgccatttagagatctaattttgtttaacttgtccaaattcctacttacagaagatgaggaatcgttggagatagtgtcttccttatgtagaggatttgaaatatcttatgatgacttgataacttactttccagataggaaataccataaatatatttctaaagtatttgaacatgtagatttatcggaggaattaagtatggaattccatgatacaactctgagagatttagtctatcttagattgtacaagtattccaagtgtatacggccgtgttataaattaggagataatctaaaaggcatagttgttataaaggacaggaatatttatattagagaagcaaatgatgacttgatagaatatctcctcaaggaatacactcctcagatttatacatattctaatgagcgcgtccccataactggttcaaaattaattctttgtggattttctcaagttacatttatggcgtatacaacgtcgcatataacaacaaataaaaaggtagatgttctcgtttccaaaaaatgtatagatgaactagtcgatccaataaattatcaaatacttcaaaatttatttgataaaggaagcggaacaataaacaaaatactcaggaagatattttattcggtaaccggtggccaaactccataatttgctttttctatttcggattttagaatttccaaattcaccagcgatttatcggttttggtgaaatccaaggatttattaatgtccacaaatgccatttgttttgtctgtggattgtatttgaaaatggaaacgatgtagttagatagatgcgctgcaaagtttcctattagggttccgcgctttacgtcacccagcatacttgaatcaccatcctttaaaaaaaatgataagatatcaacatggagtatatcatactcggattttaattcttctactgcatcactgacattttcacaaatactacaatacggtttaccgaaaataatcagtacgttcttcatttatgggtatcaaaaacttaaaatcgttactgctggaaaataaatcactgacgatattagatgataatttatacaaagtatacaatggaatatttgtggatacaatgagtatttatatagccgtcgccaattgtgtcagaaacttagaagagttaactacggtattcataaaatacgtaaacggatgggtaaaaaagggagggcatgtaaccctttttatcgatagaggaagtataaaaattaaacaagacgttagagacaagagacgtaaatattctaaattaaccaaggacagaaaaatgctagaattagaaaagtgtacatccgaaatacaaaatgttaccggatttatggaagaagaaataaaggcagaaatgcaattaaaaatcgataaactcacatttcaaatatatttatctgattctgataacataaaaatatcattgaatgagatactaacacatttcaacaataatgagaatgttacattattttattgtgatgaacgagacgcagaattcgttatgtgtctcgaggctaaaacacatttctctaccacaggagaatggccgttgataataagtaccgatcaggatactatgctatttgcatctactgataatcatcctaagatgataaaaaacttaactcaactgtttaaatttgttccctcggcagaggataactatttagcaaaattaacggcgttagtgaatggatgtgatttctttcctggactctatggggcatctataacacccaccaacttaaacaaaatacaattgtttagtgattttacaatcgataatatagtcactagtttggcaattaaaaattattatagaaagactaactctaccgtagacgtgcgtaatattgttacgtttataaacgattacgctaatttagacgatgtctactcgtatgttcctccttgtcaatgcactgttcaagaatttatattttccgcattagatgaaaaatggaacaattttaaatcatcttatttagagaccgttccgttaccctgccaattaatgtatgcattagaaccacgcaaggagattgatgtttcagaagttaaaactttatcatcttatatagatttcgaaaatactaaatcagatatcgatgttataaaatctatatcttcgatcttcggatattctaacgaaaactgtaacactatagtgttcggcatctataaggataatttactactgagtataaatagttcattttactttaacgatagtctgttaataaccaatactaaaagtgataatataataaatataggttactagattaaaaatggtgttccaactcgtgtgctctacgtgcggcaaagatatttctcacgaacgatataaattgattatacgaaaaaaatcattaaaggatgtactcgtcagtgtaaagaacgaatgttgtaggttaaaattatctacacaaatagaacctcaacgtaacttaacagtgcaacctctattggatataaactaatatggatccggttaattttatcaagacatatgcgcctagaggttctattatttttattaattataccatgtcattaacaagtcatttgaatccatcgatagaaaaacatgtgggtatttattatggtacgttattatcggaacacttggtagttgaatctacctatagaaaaggagttcgaatagtcccattggatagtttttttgaaggatatcttagtgcaaaagtatacatgttagagaatattcaagttatgaaaatagcagctgatacgtcattaactttattgggtattccgtatggatttggtcatgatagaatgtattgttttaaattggtagctgaatgttataaaaatgccggtattgatacatcgtctaaacgaatattaggtaaagatatttttctgagccaaaacttcacagatgataatagatggataaagatatatgattctaataatttaacattttggcaaattgattaccttaaagggtgagttaatatgcataactactcctccgttgttttttccctcgttctttttcttaacgttgtttgccatcactctcataatgtaaagatattctaaaatggtaaacttttgcatatcggacgcagaaattggtataaatgttgtaattgtattatttcccgtcaatggactagtcacagctccatcagttttatatcctttagagtatttctcactcgtgtctaacattctagagcattccatgatctgtttatcgttgatattggccggaaagatagattttttattttttattatattactattggcaattgtagatataacttctggtaaatatttttctaccttttcaatctcttctattttcaagccggctatatattctgctatattgttgctagtatcaataccttttctggctaagaagtcatatgtggtattcactatatcagttttaactggtagttccattagcctttccacttctgcagaataatcagaaattggttctttaccagaaaatccagctactataataggctcaccgatgatcattggcaaaatcctatattgtaccagattaatgagagcatatttcatttccaataattctgctagttcttgagacattgatttatttgatgaatctagttggttctctagatactctaccatttctgccgcatacaataacttgttagataaaatcagggttatcaaagtgtttagcgtggctagaatagtgggcttgcatgtattaaagaatgcggtagtatgagtaaaccgttttaacgaattatatagtctccagaaatctgtggcgttacatacatgagccgaatgacatcgaagattgtccaatatttttaatagctgctctttgtccattatttctatatttgactcgcaacaattgtagataccattaatcactgattcctttttcgatgccggacaatagcacaattgtttagctttggactctatgtattcagaattaatagatatatctctcaatacagattgcactatacattttgaaactatgtcaaaaattgtagaacgacgctgttctgcagccatttaactttaaataatttacaaaaatttaaaatgagcatccgtataaaaatcgataaactgcgccaaattgtggcatatttttcagagttcagtgaagaagtatctataaatgtagactcgacggatgagttaatgtatatttttgccgccttgggcggatctgtaaacatttgggccattatacctctcagtgcatcagtgttctaccgcggagccgaaaacattgtgtttaatcttcctgtgtccaaggtaaaatcgtgtttgtgtagttttcacaatgatgccatcatagatatagaacctgatctggaaaataatctagtaaaactttctagttatcatgtagtaagtgtcgattgtaacaaggaactgatgcctattaggacagatactactatttgtctaagtatagatcaaaagaaatcttacgtgtttaattttcacaagtatgaagaaaaatgttgtggtagaaccgtcattcatttagaatggttgttgggctttatcaagtgtattagtcagcatcagcatttggctattatgtttaaagatgacaatattattatgaagactcctggtaatactgatgcgttttccagggaatattctatgactgaatgttctcaagaactacaaaagttttctttcaaaatagctatctcgtctctcaacaaactacgaggattcaaaaagagagtcaatgtttttgaaactagaatcgtaatggataatgacgataacattctaggaatgttgttttcggatagagttcaatcctttaagatcaacatctttatgacgtttttagattaatactttcaatgagataaatatgggtggcagagtaagtgttgagctccctaaacgggatccgcctccgggagtacccactgatgagatgttattaaacgtggataaaatgcatgacgtgatagctcccgctaagcttttagaatatgtgcatataggaccactagcaaaagataaagaggataaagtaaagaaaagatatccagagtttagattagtcaacacaggacccggtggtctttcggcattgttaagacaatcgtataatggaaccgcacccaattgctgtcgcacttttaatcgtactcattattggaaaaaggatggaaagatatcagataagtatgaagagggtgcagtattagaatcgtgttggccagacgttcacgacactggaaaatgcgatgttgatttattcgactggtgtcagggggatacgttcgatagaaacatatgccatcagtggatcggttcagcctttaataggagtgatagaactgtagagggtcaacaatcgttaataaatctgtataataagatgcaaacattatgtagtaaagatgctagtgtaccaatatgtgaatcatttttgcatcatttacgcgcacacaatacagaagatagcaaagagatgatcgattatattctaagacaacagtctgcggactttaaacagaaatatatgagatgtagttatcccactagagataagttagaagagtcattaaaatatgcggaacctcgagaatgttgggatccagagtgttcgaatgccaatgttaatttcttactaacacgtaattataataatttaggactttgcaatattgtacgatgtaatactagcgtgaacaacttacagatggataaaacttcctcattaagattgtcatgtggattaagcaatagtgatagattttctactgttcccgtcaatagagcaaaagtagttcaacataatattaaacattcgttcgacctaaaattgcatttgatcagtttattatctctcttggtaatatggatactaattgtagctatttaaatgggtgccgcggcaagcatacagacgacggtgaatacactcagcgaacgtatctcgtctaaattagaacaagaagcgaacgctagtgctcaaacaaaatgtgatatagaaatcggaaatttttatatccgacaaaaccatggatgtaacctcactgttaaaaatatgtgctctgcggacgcggatgctcagttggatgctgtgttatcagccgctacagaaacatatagtggattaacaccggaacaaaaagcatacgtaccagctatgtttactgctgcgttaaacattcagacgagtgtaaacactgttgttagagattttgaaaattatgtgaaacagacttgtaattctagcgcggtcgtcgataacaaattaaagatacaaaacgtaatcatagatgaatgttacggagccccaggatctccaacaaatttggaatttattaatacaggatctagcaaaggaaattgtgccattaaagcgttgatgcaattgacgactaaggccactactcaaatagcacctagacaagttgctggtacaggagttcagttttatatgattgttatcggtgttataatattggcagcgttgtttatgtactatgccaagcgtatgttgttcacatccaccaatgataaaatcaaacttattttagccaataaggaaaacgtccattggactacttacatggacacattctttagaacttctccgatggttattgctaccacggatatgcaaaactgaaaatatattgataatattttaatagattaacatggaagttatcgctgatcgtctagacgatatagtgaaacaaaatatagcggatgaaaaatttgtagattttgttatacacggtctagagcatcaatgtcctgctatacttcgaccattaattaggttgtttattgatatactattatttgttatagtaatttatatttttacggtacgtctagtaagtagaaattatcaaatgttgttggcgttggtggcgctagtcatcacattaactattttttattactttatactataatagtactagactgacttctaacaaacatctcacctgccataaataaatgcttgatattaaagtcttctatttctaacactattccatctgtggaaaataatactctgacattatcgctaattgacacatcggtgagtgatatgcctataaagtaataatcttctttgggcacatataccagtgtaccaggttctaacaacctatttactggtgctcctgtagcatactttttctttaccttgagaatatccatcgtttgcttggtcaatagcgatatgtgattttttatcaaccactcaaaaaagtaattggagtgttcatatcctctacgggctattgtctcatggccgtgtatgaaatttaagtaacacgactgtggtagatttgttctatagagccggttgccgcaaatagatagaactaccaatatgtctgtacaaatgttaaacattaattgattaacagaaaaaacaatgttcgttctgggaatagaaaccagatcaaaacaaaattcgttagaatatatgccacgtttatacatggaatataaaataactacagtttgaaaaataacagtatcatttaaacatttaacttgcggggttaatttcacaactttactgtttttaaactgttcaaaatatagcatcgatccatgagaaatacgtttagccgcctttaatagaggaaatcccaccgcctttctggatctcaccaacgacgatagttctgaccagcaacttatttcttcatcatccacctgttttaacatataataggcaggagatagatatccgtcattgcaatattccttttcgtaggcacacaatctaatattgataaaatctccattctcttctctgcatttattatcttgtttcggtggctgattaggctgtagtcttggtttaggctttggtatatcgttgttgaatctattttggtcattaaatctttcatttcttcctggtatatttttatcacctcgtttggttggatttttgtctatattatcgtttgtaacatcggtacgggtattcatttatcacaaaaaaaacttctctaaatgagtctactgctagaaaacctcatcgaagaagataccatattttttgcaggaagtatatctgagtatgatgatttacaaatggttattgccggcgcaaaatccaaatttccaagatctatgctttctatttttaatatagtacctagaacgatgtcaaaatatgagttggagttgattcataacgagaatatcacaggggcaatgtttaccacaatgtataatataagaaacaatttgggtctaggagatgataaactaactattgaagccattgaaaactatttcttggatcctaacaatgaggttatgcctcttatcattaataatacggatatgactgccgtcattcctaaaaaaagtggtaggagaaagaataagaacatggttattttccgtcaaggatcatcacctatcttgtgtattttcgaaactcgtaaaaagattaatatttataaagaaaatatggaatccgcgtcgactgagtatacacctatcggagacaacaaggctttgatatctaaatatgcgggaattaatgtcctgaatgtgtattctccttccacatccatgagattgaatgccatttacggattcaccaataaaaataaactagagaaacttagtactaataaggaactagaatcgtatagttctagccctcttcaagaacccattaggttaaatgattttctgggactattggaatgtgttaaaaagaatattcctctaacagatattccgacaaaggattgattactataaatggagaatgttcctaatgtatactttaatcctgtgtttatagagcccacgtttaaacattctttattaagtgtttataaacacagattaatagttttatttgaagtattcattgtattcattctaatatatgtattttttagatctgaattaaatatgttcttcatgcctaaacgaaaaatacccgatcctattgatagattacgacgtgctaatctagcgtgtgaagacgataaattaatgatctatggattaccatggatgacaactcaaacatctgcgttatcaataaatagtaaaccgatagtgtataaagattgtgcaaagcttttgcgatcaataaatggatcacaaccagtatctcttaacgatgttcttcgcagatgatgattcattttttaagtatttggctagtcaagatgatgaatcttcattatctgatatattgcaaatcactcaatatctagactttctgttattattattgatccaatcaaaaaataaattagaagccgtgggtcattgttatgaatctctttcagaggaatacagacaattgacaaaattcacagactttcaagattttaaaaaactgtttaacaaggtccctattgttacagatggaagggtcaaacttaataaaggatatttgttcgactttgtgattagtttgatgcgattcaaaaaagaatcctctctagctaccaccgcaatagatcctattagatacatagatcctcgtcgcgatatcgcattttctaacgtgatggatatattaaagtcgaataaagtgaacaataattaattctttattgtcatcatgaacggcggacatattcagttgataatcggccccatgttttcaggtaaaagtacagaattaattagacgagttagacgttatcaaatagctcaatataaatgcgtgactataaaatattctaacgataatagatacggaacgggactatggacgcatgataagaataattttgaagcattggaagcaactaaactatgtgatgtcttggaatcaattacagatttctccgtgataggtatcgatgaaggacagttctttccagacattgttgaattctgtgagcgtatggcaaacgaaggaaaaatagttatagtagccgcactcgatgggacatttcaacgtaaaccgtttaataatattttgaatcttattccattatctgaaatggtggtaaaactaactgctgtgtgtatgaaatgctttaaggaggcttccttttctaaacgattgggtgaggaaaccgagatagagataataggaggtaatgatatgtatcaatcggtgtgtagaaagtgttacgtcggctcataatattatattttttatctaaaaaactaaaaataaacattgattaaattttaatataatacttaaaaatggatgttgtgtcgttagataaaccgtttatgtattttgaggaaattgataatgagttagattacgaaccagaaagtgcaaatgaggtcgcaaaaaaactgccgtatcaaggacagttaaaactattactaggagaattattttttcttagtaagttacagcgacacggtatattagatggtgccaccgtagtgtatataggatctgctcccggtacacatatacgttatttgagagatcatttctataatttaggagtgatcatcaaatggatgctaattgacggccgccatcatgatcctattttaaatggattgcgtgatgtgactctagtgactcggttcgttgatgaggaatatctacgatccatcaaaaaacaactgcatccttctaagattattttaatttctgatgtgagatccaaacgaggaggaaatgaacctagtacggcggatttactaagtaattacgctctacaaaatgtcatgattagtattttaaaccccgtggcgtctagtcttaaatggagatgcccgtttccagatcaatggatcaaggacttttatatcccacacggtaataaaatgttacaaccttttgctccttcatattcagctgaaatgagattattaagtatttataccggtgagaacatgagactgactcgagttaccaaatcagacgctgtaaattatgaaaaaaagatgtactaccttaataagatcgtccgtaacaaagtagttgttaactttgattatcctaatcaggaatatgactattttcacatgtactttatgctgaggaccgtgtactgcaataaaacatttcctactactaaagcaaaggtactatttctacaacaatctatatttcgtttcttaaatattccaacaacatcaactgaaaaagttagtcatgaaccaatacaacgtaaaatatctagcaaaaattctatgtctaaaaacagaaatagcaagagatccgtacgcagtaataaatagaaacgtactactgagatatactaccgatatagagtataatgatttagttactttaataaccgttagacataaaattgattctatgaaaactgtgtttcaggtatttaacgaatcatccataaattatactccggttgatgatgattatggagaaccaatcattataacatcgtatcttcaaaaaggtcataacaagtttcctgtaaattttctatacatagatgtggtaatatctgacttatttcctagctttgttagactagatactacagaaactaatatagttaatagtgtactacaaacaggcgatggtaaaaagactcttcgtcttcccaaaatgttagagacggaaatagttgtcaagattctctaccgtcctaatataccattaaaaattgttagatttttccgcaataacatggtaactggagtagagatagccgatagatctgttatttcagtcgctgattaatcaattagtagagatgagataagaacattataataatcaataatatattttatatcttatatcttgtttagaaaaatgctaatattaaaatagctaacgctagtaatccaatcggaagccatttgatatctataatagggtatctaatttcctgattcagatagcggacagctatattctcggtagctactcgtttggaatcacaaacattatttacatctaatttactatctgtaatggaaacgtttcccaatgaaatggtacaatccgatacattgcattttgttatatttttttttaaagaggctggtaacaacgcatcgcttcgtttacatggctcgtaccaacaataatagggtaatcttgtatctattcctatccgtactatgcttttatcaggataaatacatttacatcgtatatcgtctttgttagcatcacagaatgcataaatttgttcgtccgtcatgataaaaatttaaagtgtaaatataactattattttatagttgtaataaaaagggaaatttgattgtatactttcggttctttaaaagaaactgacttgataaaaatggctgtaatctctaaggttacgtatagtctatatgatcaaaaagagattaatgctacagatattatcattagtcatgttaaaaatgacgacgatatcggtaccgttaaagatggtagactaggtgctatggatggggcattatgtaaaacttgtgggaaaacggaattggaatgtttcggtcactggggtaaagtaagtatttataaaactcatatagttaagcctgaatttatttcagaaattattcgtttactgaattatatatgtattcactgcggattattgcgttcacgagaaccgtattccgacgatattaacctaaaagagttatcgggacacgctcttaggagattaaaggataaaatattatccaagaaaaagtcatgttggaacagtgaatgtatgcaaccgtatcaaaaaattactttttcaaagaaaaaggtttgtttcgtcaacaagttggatgatattaacgttcctaattctctcatctatcaaaagttaatttctattcatgaaaagttttggccattattagaaattcatcaatatccagctaacttattttatacagactactttcccatccctccgttgattattagaccggctattagtttttggatagatagtatacccaaagaaaccaatgaattaacttacttattaggtatgatcgttaagaattgtaacttgaatgctgatgaacaggttatccagaaggcggtaatagaatacgatgatattaaaattatttctaataacacttccagtatcaatttatcatatatcacatccggcaaaaataatatgattagaagttatatcgtcgcccggcgaaaagatcagaccgctagatctgtaattggtcccagtacatctatcaccgttaatgaggtaggaatgcccgcatatattagaaatacacttacagaaaagatatttgttaatgcctttacagtggataaagttaaacaactattagcgtcaaaccaagttaaattttactttaataaacgattaaaccaattaacaagaatacgccaaggaaagtttatcaaaaataaaatacatttattgcctggtgattgggtagaagtagctgttcaagaatatacaagtattatttttggaagacagccgtctctacatagatacaacgtcatcgcttcatctatcagagctaccgaaggagatactatcaaaatatctcccggaattgtcaactctcaaaatgctgatttcgacggagatgaagaatggatgatattggagcaaaatcctaaagccgtaattgaacaaagtattcttatgtatccgacgacgttactcaaacacgatattcatggagcccccgtttatggatctattcaagatgaaatcgtagcagcgtattcattgtttaggatacaagatctttgtttagatgaagtattgaacatcttggggaaatatggaagagagttcgatcctaaaggtaaatgtaaattcagcggtaaagatatctatacttacttgataggtgaaaagattaattatccgggtctcttaaaggatggtgaaattattgcaaacgacgtagatagtaattttgttgtggctatgaggcatctgtcattggctggactcttatccgatcataagtcgaacgtggaaggtatcaactttattatcaagtcatcttatgtttttaagagatatctatctatttacggttttggggtgacattcaaagatctgagaccaaattcgacgttcactaataaattggaggccatcaacgtagaaaaaatagaacttatcaaagaagcatacgccaaatatctcaacgatgtaagagacgggaaaatagttccattatctaaagctttagaggcggactatgtggaatccatgttatccaacttgacaaatcttaatatccgagagatagaagaacatatgagacaaacgctgatagatgatccagataataacctcctgaaaatggccaaagcgggttataaagtaaatcccacagaactaatgtatattctaggtacttatggacaacagaggattgatggtgaaccagcagagactcgagtattgggtagagtcttaccttactatcttccagactctaaggatccagaaggaagaggttacattcttaattctttaacaaaaggattaacgggttctcaatattacttttcgatgctggttgcaagatctcaatctactgatatcgtctgtgaaacatcacgtaccggaacactggctagaaaaatcattaaaaagatggaggatatggtggtcgacggatacggacaagtagttataggtaatacgctcatcaagtacgccgccaattataccaaaattctaggctcagtatgtaaacctgtagatcttatctatccagatgagtccatgacttggtatttggaaattagtgctctgtggaataaaataaaacagggattcgtttactctcagaaacagaaacttgcaaaaaagacattggcgccgtttaatttcctagtattcgtcaaacccaccactgaggataatgctattaaggttaaggatctgtacgatatgattcataacgtcattgatgatgtgagagagaaatacttctttacggtatctaatatagattttatggagtatatattcttgacgcatcttaatccttctagaattagaattacaaaagaaacggctatcactatctttgaaaagttctatgaaaaactcaattatactctaggtggtggaactcctattggaattatttctgcacaggtattgtctgagaagtttacacaacaagccctgtccagttttcacactactgaaaaaagtggtgccgtcaaacaaaaacttggtttcaacgagtttaataacttgactaatttgagtaagaataagaccgaaattatcactctggtatccgatgatatctctaaacttcaatctgttaagattaatttcgaatttgtatgtttgggagaattaaatccaaacatcactcttcgaaaagaaacagataggtatgtagtagatataatagtcaatagattatacatcaagagagcagaaattaccgaattagtcgtcgaatatatgattgaacgattcatctcctttagcgtcattgtaaaggaatggggtatggaaacattcattgaggatgaggataatattagatttactgtctacctaaatttcgttgaaccggaagaattgaatcttagtaagtttatgatggttcttccgggtgccgccaacaagggcaagattagtaaattcaagattcctatctctgattatacgggatatgacgacttcaatcaaacaaaaaagctcaataagatgactgtagaactcatgaatctaaaagaattgggttctttcgatttggaaaacgtcaacgtgtatcctggagtatggaatacatacgatatcttcggtatcgaggccgctcgtgaatacttgtgcgaagccatgttaaacacctatggagaagggttcgattatctgtatcagccttgtgatcttctcgctagtttactatgtgctagttacgaaccagaatcagtgaataaattcaagttcggcgcagctagtactcttaagagagctacgttcggagacaataaagcattgttaaacgcggctcttcataaaaagtcagaacctattaacgataatagtagctgccacttttttagcaaggtccctaatataggaactggatattacaaatactttatcgacttgggtcttctcatgagaatggaaaggaaactatctgataagatatcttctcaaaagatcaaggaaatggaagaaacagaagacttttaattcttatcaataacatatttttctatgatctgtcttttaaacgatggattttccacaaatgcgcctctcaagtccctcatagaatgatacacgtataaaaaatatagcataggcaatgactccttatttttagacattagatatgccaaaatcatagccccgcttctatttactcccgcagcacaatgaaccaacacgggctcgtttcgttgatcacatttagataaaaaggcggttacgtcgtcaaaatatttactaatatcggtagttgtatcatctaccaacggtatatgaataatattaatattagagttaggtaatgtatatttatccatcgtcaaatttaaaacatatttgaacttaacttcagatgatggtgcatccatagcatttttataatttcccaaatacacattattggttactcttgtcattatagtgggagatttggctttgtgcatatctccagttgaacgtagtagtaagtatttatacaaacttttcttatccatttataacgtacaaatggataaaactactttatcggtaaacgcgtgtaatttagaatacgttagagaaaaggctatagtaggcgtacaagcagccaaaacatcaacacttatattctttgttattatattggcaattagtgcgctattactctggtttcagacgtctgataatccagtctttaatgaattaacgagatatatgcgaattaaaaatacggttaacgattggaaatcattaacggatagcaaaacaaaattagaaagtgatagaggtagtcttctagccgctggtaaggatgatatattcgaattcaaatgtgtggatttcggcgcctattttatagctatgcgattggataagaaaacatatctgccgcaagctattaggcgaggtactggagacgcgtggatggttaaaaaggcggcaaaggtcgatccatctgctcaacaattttgtcagtatttgataaaacacaagtctaataatgttattacttgtggtaatgagatgttaaatgaattaggttatagcggttattttatgtcaccgcattggtgttccgattttagtaatatggaatagtgttagataaatgcggtaacgaatgttcctgtaaggaaccataacagcttagatttaacgttaaagatgagcataaacataataaacaaaattacaatcaaacctataacattaatatcaaacaatccaaaaaatgaaatcagtggagtagtaaacgcgtacataactcctggataacgtttagcagctgccgttcctattctagaccaaaaattcggtttcatgttttcgaaacggtattctgcaacaagtcgaggatcgtgttctacatatttggcggcgttatccagtatctgcctattgatcttcatttcgttttcgattctggctatttcaaaataaaatcccgatgatagacctccagactttataatttcatctacgatgttcagcgccgtagtaactctaataatataggctgataagctaacatcataccctcctgtatatgtgaatatggcatgatttttgtccattacaagctcggttttaactttattgcctgtaataatttctctcatctgtaggatatctatttttttgtcatgcattgccttcaagacgggacgaagaaacgtaatatcctcaataacgttatcgttttctacaataactacatattctacctttttattttctaactcggtaaaaaaattagaatcccatagggctaaatgtctagcgatatttcttttcgtttcctctgtacacatagtgttacaaaaccctgaaaagaagtgagtatacttgtcatcatttctaatgtttcctccagtccactgtataaacgcataatccttgtaatgatctggatcatccttgactaccacaacatttcttttttctggcataacttcattgtcctttacatcatcgaacttctgatcattaatatgctcatgaacattaggaaatgtttctgatggaggtctatcaataactggcacaacaataacaggagttttcaccgccgccatttagttattgaaattaatcatatacaactctttaatacgagttatattttcgtctatccattgtttcacatttacatatttcgacaaaaagatataaaatgcgtattccaatgcttctctgtttaatgaattactaaaatatacaaacacgtcactgtctggcaataaatgatatcttagaatattgtaacaatttattttgtattgcacatgttcgtgatctatgagttcttcttcgaatggcataggatctccgaatctgaaaacgtataaataggagttagaataataatatttgagagtattggtaatatataaactctttagcggtataattagtttttttctctcgatttctatttttagatgtgatggaaaaatgactaattttgtagcattagtatcatgaactctaatcgagatcttaatatcttcgtcacacgttagttctttgaagtttttaagagatgcatcagttggttcgaccgatggagtaggtgcaacaattttttgttcgatgtatgtatgtactggagccattgtcttaactataatggtgcttgtatcgaaaaactttaatgcagataatggaagctcttcgccgcgactttctacatcgtaattgggttctaacgccgatctctgaatggatactagttttctaagttctaatgtgattctctgaaaatgtaaatccaattcctccggcattatagatgtgtatacatcggtaaataaaactatagtatccaacgatcccttctcgcaaattctagtcttaaccaaaaaatcgtatataaccacggagatggcgtatttaagagtggattcttctaccgttttgttcttggatttcatataagaaactataaagtccgcactactgttaagaatgattactaacgcaactatatagtttaaattaagcatcttggaaacataaaataactctgtagacgatacttgactttcgaataagtttgcagacaaacgaagaaagaacagacctctcttaatttcagaagaaaactttttttcgtattcctgacgtctagagtttatatcaataagaaagttaagaattagtcggttaatgttgtatttcattacccaagtttgagatttcataatattatcaaaagacatgataatattaaagataaagcgctgactatgaacgaaatagctatatggttcgctcaagaatatagtcttgttaaacgtggaaacgataactgtatttttaatcacgtcagcggcatctaaattaaatataggtatatttattccacacactctacaatatgccacaccatcttcataataaataaattcgttagcaaaattattaattttagtgaaatagttagcgtcaactttcatagcttccttcaatctaatttgatgctcacacggtgcgaattccactctaacatcccttttccatgcctcaggttcatcgatctctataatatctagttttttgcgtttcacaaacacaggctcgtctctcgcgatgagatctgtatagtaactatgtaaatgataactagatagaaagatgtagctatatagatgacgatcctttaagagaggtatgatgactttaccccaatcagatagactgttgttatggtcttcggaaaaagaatttttataaatttttccagtattttccaaatatacgtacttaacatctaaaaaatccttaatgataataggaatggataatccgtctattttataaagaaatacatatcgcacattatacttttttttggaaatgggaataccgatgtgtctacataaatatgcaaagtctaaatattttttagagaatcttagttggtccaaattcttttccaagtacggtaatagatttttcatattgaacggtatcttcttaatctctggttctagttccgcattaaatgatgaaactaagtcactatttttataactaacgattacatcacctctaacatcatcatttaccagaatactgatcttcttttgtcgtaaatacatgtctaatgtgttaaaaaaaagatcatacaagttatacgtcatttcatctgtggtattcttgtcattgaaggataaactcgtactaatctcttctttaacagcctgttcaaatttatatcctatatacgaaaaaatagcaaccagtgtttgatcatccgcgtcaatattctgttctatcgtagtgtataacaatcgtatatcttcttctgtgatagtcgatacgttataaaggttgataacgaaaatatttttatttcgtgagataaagtcatcgtaggattttggacttatattcgcgtctagtagatatgcttttatttttggaatgatctcaattagaatagtctctttagagtccatttaaagttacaaacaactaggaaattggtttatgatgtataatttttttagtttttatagattctttattctatacttaaaaaatgaaaataaatacaaaggttcttgagggttgtgttaaattgaaagcgagaaataatcataaattatttcattatcgcgatatccgttaagtttgtatcgtaatggcgtggtcaattacaaataaagcggatactagtagcttcacaaagatggctgaaatcagagctcatctaaaaaatagcgctgaaaataaagataaaaacgaggatattttcccggaagatgtaataattccatctactaagcccaaaaccaaacgagccactactcctcgtaaaccagcggctactaaaagatcaaccaaaaaggaggaagtggaagaagaagtagttatagaggaatatcatcaaacaactgaaaaaaattctccatctcctggagtcagcgacattgtagaaagcgtggctgctgtagagctcgatgatagcgacggggatgatgaacctatggtacaagttgaagctggtaaagtaaatcatagtgctagaagcgatctttctgacctaaaggtggctaccgacaatatcgttaaagatcttaagaaaattattactagaatctctgcagtatcgacggttctagaggatgttcaagcagctggtatctctagacaatttacttctatgactaaagctattacaacactatctgatctagtcaccgagggaaaatctaaagttgttcgtaaaaaagttaaaacttgtaagaagtaaatgcgtgcacttttttataaagatggtaaactctttaccgataataattttttaaatcctgtatcagacgataatccagcgtatgaggttttgcaacatgttaaaattcctactcatttaacagatgtagtagtatatgaacaaacgtgggaggaggcgttaactagattaatttttgtgggaagtgattcaaaaggacgtagacaatacttttacggaaaaatgcatgtacagaatcgcaacgctaaaagagatcgtatttttgttagagtatataacgttatgaaacgaattaattgttttataaacaaaaatataaagaaatcgtccacagattccaattatcagttggcggtttttatgttaatggaaactatgttttttattagatttggtaaaatgaaatatcttaaggagaatgaaacagtagggttattaacactaaaaaataaacacatagaaataagtcccgatgaaatagttatcaagtttgtaggaaaggacaaagtttcacatgaatttgttgttcataagtctaatagactatataaaccgctattgaaactgacggatgattctagtcccgaagaatttctgttcaacaaactaagtgaacgaaaggtatacgaatgtatcaaacagtttggtattagaatcaaggatctccgaacgtatggagtcaattatacgtttttatataatttttggacaaatgtaaagtccatatctcctcttccgtcaccaaaaaagttaatagcgttaactatcaaacaaactgctgaagtggtaggtcatactccatcaatttcaaaaagagcttatatggcaacgactattttagaaatggtaaaggataaaaattttttagatgtagtatctaaaactacgttcgatgaattcctatctatagtcgtagatcacgttaaatcatctacggatggatgatatagatctttacacaaataattacaagaccgataaatggaaatggataagcgtatgaaatctctcgcaatgacagctttcttcggagagctaaacacattagatattatggcattgataatgtctatatttaaacgccatccaaacaataccattttttcagtggataaggatggtcagtttatgattgatttcgaatacgataattataaggcttctcaatatttggatctgaccctcactccgatatctggagatgaatgcaagactcacgcatcgagtatagccgaacaattggcgtgtgtggatattattaaagaggatattagcgaatatatcaaaactactccccgtcttaaacgatttataaaaaaataccgcaatagatcagatactcgtatcagtcgagatacagaaaagcttaaaatagctctagctaaaggcatagattacgaatatataaaagacgcttgttaataagtaaatgaaaaaaaactagtcgtttataataaaacacaatatggatgccaacatagtatcatcttctactattgcaacgtatatagacgctttagcgaagaatgcttcagaattagaacagaggtctaccgcatacgaaataaataatgaattggaactagtatttattaagccgccattaattactttgacaaatgtagtgaatatctctacgattcaggaatcgtttattcgatttaccgttactaataaggaaggtgttaaaattagaactaagattccattatctaaggtacatggtctagatgtaaaaaatgtacagttagtagatgctatagataacatagtttgggaaaagaaatcattagtgacggaaaatcgtcttcacaaagaatgcttgttgagactatcgacagaggaacgtcatatatttttggattacaagaaatatggatcctctatccgactagaattagtcaatcttattcaagcaaaaacaaaaaactttacgatagactttaagctaaaatattttctaggatccggtgcccagtctaaaagttctttattacacgctattaatcatccaaagtcaaggcctaatacatctctggaaatagaattcacacctagagacaatgaaaaagttccatatgatgaactaataaaggaattgacgactctatcacgtcatatatttatggcttctccagagaatgtaattctttctccgcctattaacgcgcctataaaaacctttatgttgcctaaacaagatatagtaggtttggatctggaaaatctatatgccgtaactaagactgacggaattcctataactatcagagttacatcaaaagggttgtattgttattttacacatcttggttatattattagatatcctgttaagagaataatagattccgaagtagtagtctttggtgaggcagttaaggataagaactggaccgtatatctcattaagctaatagagcctgtgaatgcaatcaatgatagactagaagaaagtaagtatgttgaatctaaactagtggatatttgtgatcggatagtattcaagtcaaagaaatacgaaggtccgtttactacaactagtgaagtcgtcgatatgttatctacatatttaccaaagcaaccagaaggtgttattctgttctattcaaagggacctaaatctaacattgattttaaaattaaaaaggaaaatactatagaccaaactgcaaatgtagtatttaggtacatgtccagtgaaccaattatctttggagaatcgtctatctttgtagagtataagaaatttagcaacgataaaggctttcctaaagaatatggttctggtaagattgtgttatataacggcgttaattatctaaataatatctattgtttggaatatattaatacacataatgaagtgggtattaagtccgtggttgtacctattaagtttatagcagaattcttagttaatggagaaatacttaaacctagaattgataaaaccatgaaatatattaactcagaagattattatggaaatcaacataatatcatagtcgaacatttaagagatcaaagcatcaaaataggagatatctttaacgaggataaactatcggatgtgggacatcaatacgccaataatgataaatttagattaaatccagaagttagttattttacgaataaacgaactagaggaccgttgggaattttatcaaactacgtcaagactcttcttatttctatgtattgttccaaaacatttttagacgattccaacaaacgaaaggtattggcgattgattttggaaacggtgcggacctggaaaaatacttttatggagagattgcgttattggtagcgacggatccggatgctgatgctatagctagaggaaatgaaagatacaacaaattaaactctggaattaaaaccaagtactacaaatttgactacattcaggaaactattcgatccgatacatttgtctctagtgtcagagaagtattctattttggaaagtttaatatcatcgactggcagtttgctatccattattcttttcatccgagacattatgctaccgtcatgaataacttatccgaactaactgcttctggaggcaaggtattaatcactaccatggacggagacaaattatcaaaattaacagataaaaagacttttataattcataagaatttacctagtagcgaaaactatatgtctgtagaaaaaatagctgatgatagaatagtggtatataatccatcaacaatgtctactccaatgactgaatacattatcaaaaagaacgatatagtcagagtgtttaacgaatacggatttgttcttgtagataacgttgatttcgctacaattatagaacgaagtaaaaagtttattaatggcgcatctacaatggaagatagaccgtctacaaaaaactttttcgaactaaatagaggagccattaaatgtgaaggtttagatgtcgaagacttacttagttactatgttgtttatgtcttttctaagcggtaaataataatatggtatgggttctgatatccccgttctaaatgcattaaataattccaatagagcgatttttgttcctataggaccttccaactgtggatactctgtattgttaatagatatattaatacttttgtcgggtaacagaggttctacgtcttctaaaaataaaagtttgataacatctggcctgttcataaataaaaacttggcgattctatatatactcttattatcaaatctagccattgtcttatagatgtgagctactgtaggtgtaccatttgattttctttctaatactatatatttctctcgaagaagttcttgcacatcatctgggaataaaatactactgttgagtaaatcagttattttttttatatcgatattgatggacatttttatagttaaggataataagtatcccaaagtcgataacgacgataacgaagtatttatacttttaggaaatcacaatgactttatcagatcaaaattaacaaaattaaaggagcatgtatttttttctgaatatattgtgactccagatacatatggatctttatgcgtcgaattaaatgggtctagttttcagcacggtggtagatatatagaggtggaggaatttatagatgctggaagacaagttagatggtgttctacatccaatcatatatctgaagatatgcacactgataaatttgtcatttatgatatttatacgtttgattcgttcaagaataaacgattggtatttgtacaggtgcctccatcattaggagatgatagctatttgactaatccgttattgtctccgtattatcgtaattcagtagccagacaaatggtcaatgatatgatttttaatcaagattcatttttaaaatatttattagaacatctgattagaagccactatagagtttctaaacatataacaatagttagatacaaggataccgaagaattaaatctaacgagaatatgttataatagagataagtttaaggcgtttgtattcgcttggtttaacggcgtttcggaaaatgaaaaggtactagatacgtataaaaaggtatctaatttgatataatgaattcagtgactgtatcacacgcgccatatactattacttatcacgatgattgggaaccagtaatgagtcaattggtagagttttataacgaagtagccagttggctgctacgagacgagacgtcgcctattcctgataagttctttatacagttgaaacaaccgcttagaaataaacgagtatgtgtgtgtggtatagatccgtatccgaaagatggaactggtgtaccgttcgaatcaccaaattttacaaaaaaatcaattaaggagatagcttcatctatatctagattaaccggagtaattgattataaaggttataaccttaatataatagacggggttataccctggaattattacttaagttgtaaattaggagaaacaaaaagtcacgcgatctactgggataagatttccaagttactgctgcagcatataactaaacacgttagtgttctttattgtttgggtaaaacagatttctcgaatatacgggcaaagttagaatccccggtaactaccatagtcggatatcatccagcggctagagaccgccaattcgagaaagatagatcatttgaaattatcaacgttttactggaattagacaacaaggcacctataaattgggctcaagggtttatttattaatgctttagtgaaattttaacttgtgttctaaatggatgcaactattagaggtaatgatgttatctttgttcttaagactataggtgtcccgtcagcgtgcagacaaaatgaagatccaagatttgtagaagcatttaaatgcgacgagttagaaagatatattgagaataatccagaatgtacactattcgaaagtcttagggatgaggaagcatactctatagtcagaattttcatggatgtagatttagacgcgtgtctagacgaaatagattatttaacggctattcaagattttattatcgaggtgtcaaactgtgtagctagattcgcgtttacagaatgcggtgccattcatgaaaatgtaataaaatccatgagatctaatttttcattgactaagtctacaaatagagataaaacaagttttcatattatctttttagacacgtataccactatggatacattgatagctatgaaacgaacactattagaattaagtagatcatctgaaaatccactaaccagatcgatagacactgccgtatataggagaaaaacaactcttcgggttgtaggtactaggaaaaatccaaattgcgacactattcatgtaatgcaaccaccgcatgataatatagaagattacctattcacttacgtggatatgaacaacaatagttattacttttctctacaacgacgattggaggatttagttcctgataagttatgggaaccagggtttatttcattcgaagacgctataaaaagagtttcaaaaatattcattaattctataataaactttaatgatctcgatgaaaataattttacaacggtaccactggtcatagattacgtaacaccttgtgcattatgtaaaaaacgatcgcataaacatccgcatcaactatcgttggaaaatggtgctattagaatttacaaaactggtaatccacatagttgtaaagttaaaattgttccgttggatggtaataaactgtttaatattgcacaaagaattttagacactaactctgttttattaaccgaacgaggagaccatatagtttggattaataattcatggaaatttaacagcgaagaacccttgataacaaaactaattctgtcaataagacatcaactacctaaggaatattcaagcgaattactctgtccgaggaaacgaaagactgtagaagctaacatacgagacatgttaatagattcagtggagaccgatacctatccggataaacttccgtttaaaaatggtgtattggacctggtagacggaatgttttactctggagatgatgctaaaaaatatacgtgtactgtatcaaccggatttaaatttgacgatacaaagttcgtcgaagacagtccagaaatggaagagttaatgaatatcattaacgatatccaaccattaacggatgaaaataagaaaaatagagagttgtacgaaaaaactttatctagttgtttatgcggtgctaccaaaggatgtttaacattcttttttggagaaactgcaactggaaagtcgacaaccaaacgtttgttaaagtctgctatcggtgacctgtttgttgagacgggtcaaacaattttaacagatgtattggataaaggacctaatccatttatcgctaacatgcatttgaaaagatctgtattctgtagcgaactacctgattttgcctgtagtggatcaaagaaaattagatctgacaatattaaaaagttgacagaaccttgtgtcattggaagaccgtgtttctccaataaaattaataatagaaaccatgcgacaatcattatcgatactaattacaaacctgtctttgataggatagataacgcattaatgagaagaattgccgtcgtgcgattcagaacacacttttctcaaccttctggtagagaggctgctgaaaataatgacgcgtacgataaagtcaaactattagacgaggggttagatggtaaaatacaaaataatagatatagattcgcatttctatacttgttggtgaaatggtacaaaaaatatcatgttcctattatgaaactatatcctacaccggaagagattccggactttgcattctatctcaaaataggtactctgttagtatctagctctgtaaagcatattccattaatgacggacctctccaaaaagggatatatattgtacgataatgtggttactcttccgttgactactttccaacagaaaatatccaagtattttaattctagactatttggacacgatatagagagcttcatcaatagacataagaaatttgccaatgttagtgatgaatatctgcaatatatattcatagaggatatttcatctccgtaaatatatgctcatatatttatagaagatatcacatatctaaatgaataccggaatcatagatttatttgataatcatgttgatagtataccaactatattacctcatcagttagctactctagattatctagttagaactatcatagatgagaacagaagcgtgttattgttccatattatgggatcaggtaaaacaataatcgctttgttgttcgccttggtagcttccagatttaaaaaggtttacattctagtgcctaatattaacattttgaaaatttttaattataatatgggtgtagctatgaacttgtttaatgacgaattcatagctgagaatatctttattcattccacaacaagtttttattctcttaattataacgataacgtcattaattataacggattatctcgctacaataactctatttttatcgttgatgaggcacataatatctttgggaataatactggagaacttatgaccgtgataaaaaataaaaacaagattccttttttactattgtctggatctcccattactaacacacctaatactctgggtcatattatagatttaatgtccgaagagacgatagattttggtgaaattattagtcgtggtaagaaagtaattcagacacttcttaacgaacgaggtgtgaatgtacttaaggatttgcttaaaggaagaatatcatattacgaaatgcctgataaagatctaccaacgataagatatcacggacgtaagtttctagatactagagtagtatattgtcacatgtctaaacttcaagagagagattatatgattactagacgacagctatgttatcatgaaatgtttgataaaaatatgtataacgtgtcaatggcagtattgggacaacttaatctgatgaataatttagatactttatttcaggaacaggataaggaattgtacccaaatctgaaaataaataatggcgtgttatacggagaagaattggtaacgttaaacattagttccaaatttaaatactttattaatcggatacagacactcaacggaaaacattttatatacttttctaattctacatatggcggattggtaattaaatatatcatgctcagtaatggatattctgaatataatggttctcagggaactaatccacatatgataaacggcaaaccaaaaacatttgctatcgttactagtaaaatgaaatcgtctttagaggatctattagatgtgtataattctcctgaaaacgatgatggcagtcaattgatgtttttgttttcgtcaaacattatgtccgaatcctatactctgaaagaggtaaggcatatttggtttatgactatcccagatactttttctcaatacaaccaaattcttggacgatctattagaaaattctcttacgccgatatttctgaaccagttaatgtatatcttttagccgccgtatattccgatttcaatgacgaagtgacgtcattaaacgattacacacaggatgaattaattaatgttttaccatttgacatcaaaaagctgttgtatctaaaatttaagactaaagaaacgaatagaatatactctattcttcaagagatgtctgaaacgtattctcttccaccacatccatcaattgtaaaagttttattgggagaattggtcagacaatttttttataataattctcgtattaagtataacgataccaagttacttaaaatggttacatcagttataaaaaataaagaagacgctaggaattacatagatgatattgtaaacggtcacttctttgtatcgaataaagtatttgataaatctcttttatacaaatacgaaaacgatattattacagtaccgtttagactttcctacgaaccatttgtttggggagttaactttcgtaaagaatataacgtggtatcttctccataaaactgatgagatatataaagaaataaatgtcgagctttgttaccaatggataccttccagttacattggagccacacgagctgacgttagacataaaaactaatattaggaatgccgtatataagacgtatctccatagagaaattagtggtaaaatggccaagaaaatagaaattcgtgaagacgtggaattacctctcggcgaaatagttaataattctgtagttataaacgttccgtgtgtaataacctacgcgtattatcacgttggggatatagtcagaggaacattaaacatcgaagatgaatcaaatgtaactattcaatgtggagatttaatctgtaaactaagtagagattcgggtactgtatcatttagcgattcaaagtactgcttttttcgaaatggtaatgcgtatgacaatggcagcgaagtcactgccgttctaatggaggctcaacaaggtatcgaatctagttttgtttttctcgcgaatatcgttgactcataaaaaagagaatagcggtaagtataaacacgaatactatggcaataattgcgaatgttttattcccttcgatatatttttgataatatgaaaaacatgtctctctcaaatcggacaaccatctcataaaatagttctcgcgcgctggagaggtagttgctgctcgtataatctccccagaataatatacttgcgtgtcgtcgttcaatttatacggatttctatagttctctgttatataatgcggttttccatcatgattagacgacgacaatagtgttctaaatttagatagttgatcagaatgaatgtttattggcgttggaaaaattatccatacagcgtctgcagagtggttgatagttgttcctagatatgtaaaataatccaacttactaggcagcaaattgtctagataaaatactgaatcaaacggtgcagacgtattggtggatctaatggaatccaattgattaactatcttttgaaaatatacatttttatgatccgatacttgtaagaatatagaaataatgataagtccatcatcgtgtttttttgcctcttcataagaactatattttttcttattccaatgaacaagattaatctctccagagtatttgtacacatctatcaagtgattggatccataatcgtcttcctttccccaatatatacgtagtgatgataacacatattcattggggagaaaccctccacttatatatcctcctttaaaattaatccttactagttttccagtgttctggatagtggttggtttcgactcattataatgtatgtctaacggcttcaatcgcgcgttagaaattgcttttttagtttctatattaataggagatagttgttgcggcatagtaaaaatgaaatgataactgtttaaaaatagctcttagtatgggaattacaatggatgaggaagtgatatttgaaactcctagagaattaatatctattaaacgaataaaagatattccaagatcaaaagacacgcatgtgtttgctgcgtgtataacaagtgacggatatccgttaataggagctagaagaacttcattcgcattccaagcgatattatctcaacaaaattcagattctatctttagagtatccactaaactattacggtttatgtactacaatgaactaagagaaatctttagacggttgagaaaaggttctatcaacgatatcgatcctcactttgaagagttaatattattgggtggtaaactagataaaaaggaatctattaaagattgtttaagaagagaattaaaagaggaaagtgatgaacgtataacagtaaaagaatttggaaatgtaattctaaaacttacaacacgggataaattatttaataaagtatatataagttattgcatggcgtgttttattaatcaatcgttggaggatttatcgcatactagtatttacaatgtagaaattagaaagattaaatcattaaatgattgtattaacgacgataaatacgaatatctgtcttatatttataatatgctagttaatagtaaatgaacttttacagatctagtataattagtcagattattaagtataatagacgactagctaagtctattatttgcgaggatgactctcaaattattacactcacggcattcgttaaccaatgcctatggtgtcataaacgagtatccgtgtccgctattttattaactactgataacaaaatattagtatgtaacagacgagatagttttctctattctgaaataattagaactagaaacatgtctagaaagaaacgattatttctgaattattccaattatttgtccaaacaggaaagaagtatactatcgtcatttttttctctagatccagctactactgataatgatagaatagatgctatttatccgggtggcatacccaaaaggggtgagaatgttccagagtgtttatccagggaaattaaagaagaagttaatatagacaattcttttgtattcatagacactcggttttttattcatggcatcatagaagataccattattaataaattttttgaggtaatcttctttgtcggaagaatatctttaacgagtgatcaaatcattgatacatttaaaagtaatcatgaaatcaaggatctaatatttttagatccgaattcaggtaatggactccaatacgaaattgcaaaatatgctctagatactgcaaaactcaaatgttatggccatagaggatgttattacgaatcattaaaaaaattaactgaggatgattgattagaaaatataaattaatttaccatcgtgtatttttataacgggattgtccggcatatcatgtagatagttaccgtctacatcgtatactcgaccatctacgcctttaaatcctctatttattgacattaatctattagaattggaataccaaatattagtaccctcaattagtttattggtaatattttttttagacgatagatcgatggctcttgaaaccaaggttttccaaccggactcattgtcgatcggtgagaagtctttttcattagcatgaatccattctaatgatgtatgtttaaacactctaaacaattggacaaattcttttgatttgctttgaatgatttcaaataggtcttcgtctacagtaggcataccattagataatctagccattataaagtgcacgtttacatatctacgttctggaggagtaagaacgtgactattgagacgaatggctcttcctactatctgacgaagagacgcctcgttccatgtcatatctaaaatgaagatatcattaattgagaaaaaactaataccctcgcctccactagaagagaatacgcatgttttaatgcattctccgttagtgtttgattcttggttaaactcagccaccgccttgattctagtatcttttgttctagatgagaactctatattagagataccaaagactttgaaatatagtaataagatttctattcctgactgattaacaaatggttcaaagactagacatttaccatgggatgctaatattcccaaacatacatctataaatttgacgcttttctcttttaattcagtaaatagagagatatcagccgcactagcatcccctttcaatagttctccctttttaaaggtatctaatgcggatttagaaaactctctatctcttaatgaatttttaaaatcattatatagtgttgctatctcttgcgcgtattcgcccggatcacgattttgtctttcaggaaagctatcgaacgtaaacgtagtagccatacgtctcagaattctaaatgatgatatacctgtttttatttcagcgagtttagccttttgataaatttcttcttgctttttcgacatattaacgtatcgcattaatactgttttcttagcgaatgatgcagacccttctacgtcatcaaaaatagaaaactcgttattaactatgtacgaacataggcctcctagtttggagactaattctttctcatcaactagacgtttattctcaaatagcgattggtgttgtaaggatcctggtcgtagtaagttaaccaacatggtgaattcttgcacactattaacgataggtgtagccgataaacaaatcatcttatggttttttaatgcgatggtcttagataaaaaattatatactgaacgagtaggacggatcttaccatcttctttgattaatgatttagaaatgaagttatgacattcatcaataatgacgcatattctactcttggaattaatagttttgatattagtaaaaaatttatttctaaaattttgatcatcgtaattaataaaaatacaatccttcgttatctctggagcgtatctgagtatagtgttcatccaaggatcttctatcaaagcctttttcaccaataagataatagcccaattcgtataaatatccttaagatgtttgagaatatatacagtagtcattgttttaccaacacccgtttcatggaacaataaaagagaatgcatactgtctaatcctaagaaaactcttgctacaaaatgttgataatccttgaggcgtactacgtctgttcccatcatttcaacaggcatattagtagttctgcgcaatgcataatcgatataggccgcgtgtgatttactcatttatgagtgataagtaataactatgttttaaaaatcacagcagtagtttaactagtcttctctgatgtttgttttcgatactttttgaatcagaagtcatactagaataaagcaacgagtgaacgtaatagagagcttcgtatactctattcgaaaactctaagaacttattaatgaattccgtatccactggattgtttaaaatactaaattgaacactgttcacatccttccaagaagaagacttagtgacggacttaacatgagacataaataaatccaaattttttttacaaacatcactagccaccataatggcgctatctttcaaccagctatcgcttacgcattttagcagtctaacatttttaaagagactacaatatattctcatagtatcgattacacctctaccgaataaagttggaagtttaataatacaatatttttcgtttacaaaatcaaataatggtcgaaacacgtcgaaggttaacatcttataatcgctaatgtatagattgttttcagtgagatgattattagatttaatagcatctcgttcacgtttgaacagtttattgtgtgcgctgaggtcggcaactacggcgtccgctttagtactcctcccataatactttacgctattaatctttaaaatttcatagactttatctagatcgctttctggtaacatgatatcatgtgtaaaaagttttaacatgtcggtcggcattctatttagatcattaactctagaaatctgaagaaagtaattagctccgtattccagactaggtaatgggcttttacctaaagacaagttaagttctggcaatgtttcataaaatggaagaaggacatgcgttccctcccggatattttttacaatttcatccatttacaactctatagtttgttttcattattattagttattatctcccataatcttggtaatacttaccccttgatcgtaagataccttatacaggtcattacatacaactaccaattgtttttgtacataatagattggatggttgacatccatggtggaataaactactcgaacagatagtttatctttccccctagatacattggccgtaatagttgtcggcctaaagaatatctttggtgtaaagttaaaagttagggttcttgttccattattgctttttgtcagtagttcattataaattctcgagatgggtccgttctctgaatatagaacatcatttccaaatctaacttctagtctagaaataatatcggtcttattcttaaaatctattcccttgatgaagggatcgttaatgaacaaatccttggcctttgattcggctgatctattatctccgttatagacgttacgttgactagtccaaagacttacaggaatagatgtatcgatgatgttgatactatgtgatatgtgagcaaagattgttctcttagtggcatcactatatgttccagtaatggcggaaaactttttagaaatgttatatataaaagaattttttcgtgttccaaacattagcagattagtatgaagataaacactcatattatcaggaacattatcaatttttacatacacatcagcatcttgaatagaaacgataccatcttctggaacctcaacaatctcggcagactccggataaccagtcggtgggccatcactaacaataactagatcatccaacaatctactcacatatgcatctatataatctttttcatcttgtgagtaccctggatacgaaataaatttattatccgtatttccataataaggtttagtataaacagagagcgatgttgccgcatgaacttcagttacagtcgccgttggttggtttatttgacctattactctcctaggtttctctataaacgatggtttaatttgtacattcttaaccatatatccaataaagctcaattcaggaacataaacaaattctttgttgaacgtttcaaagtcgaacgaagagtcacgaataacgatatcggatactggattgaaggttaccgttacggtaatttttgaatcggatagtttaagactgctgaatgtatcttccacatcaaacggagttttaatataaacgtatactgtagatggttctttaatagtgtcattaggagttaggccaatagaaatatcattaagttcactagaatatccagagtgtttcaaagcaattgtattattgatacaattattatataattcttcgccctcaatttcccaaataacaccgttacacgaagagatagatacgtgattaatacatttatatccaacatatggtacgtaaccgaatcttcccatacctttaacttctggaagttccaaactcagaaccaaatgattaagcgcagtaatatactgatccctaatttcgaagctagcgatagcctgattgtctggaccatcgtttgtcataactccggatagagaaatatattgcggcatatacaaagttggaatttgactatcgactgcgaagacattagaccgtttaatagagtcatccccaccgatcaaagaattaatgatagtattattcattttctatttaaaatggaaaaagcttacaataaactccgtagagaaatatctataatttgtgagttttccttaaagtaacagcttccgtaaacgccgtctttatctcttagtaggtttattgtatttatgaccttttccttatcttcatagaatactaaaggcaacaaagaaatttttggttcttctctaagagctacgtgagacttaaccatagaagccaacgaatccctacatattttagaacagaaatacccaacttcaccacccttgaatgtctcaatactaataggtctaaaaaccaaatcttgattacaaaaccaacacttatcaattacactatttgtcttaatagacacatctgccatagatttataatactttggtagtatacaagcgagtgcttcttctttagcgggcttaaagactgctttaggtgctgaaataaccacatctggaaggcttactcgcttagccatttaattacggaactatttttttatacttctaatgagcaagtagaaaacctctcatctacaaaaacatactcgtgtccataatcctctaccatagttacacgttttttagatctcatatgtgctaaaaagttttcccatactaattggttactattatttttcgtataatttttaacagtttgaggttttagatttttagttacagaagtgatatcgaatattttatccaaaaagaatgaataattaattgtcttagaaggagtgttttcttggcaaaagaataccaagtgcttaaatatttctactacttcattaatcttttctgtactcagattcagtttctcatcttttacttgattgattatttcaaagactaacttataatcctttttatttattctctcgttagccttaagaaaactagatacaaaatttgcatctacatcatccgtggatatttgatttttttccatgatatccaagagttccgagataatttctccagaacattgatgagacaataatctccgcaatacatttctcaaatgaataagtttattagacacatggaagtttgactttttttgtacctttgtacatttttgaaatacagactcgcaaaaaatacaatattcatatccttgttcagatactataccgttgtgtctacaaccgctacataatcgtagattcatgttaacactctacgtatctcgtcgtccaatattttatataaaaacattttatttctagacgttgccagaaaatcctgtaatatttttagttttttgggctgtgaataaagtatcgccctaatatggttaccgtcctccgccaatatagtagttaaattatccgcacatgcagaagaacaccgcttaggcggattcagtacaatgttatatttttcgtaccaactcatttaaatatcataatctaaaatagttctgtaatatgtctagcgctaatatattgatcataatcctgtgcataaattaagatacaacaatgtctcgaaatcatcgacatggcttcttccatagttagaagatcgtcgtcaaagttagcaacgtgattcatcaacatttgctgttttgaggcagcaaatactgaaccgtcgccattcaaccattcataaaaaccatcgtctgaatccattgataatttcttgtactggtttttgagagctcgcatcaatctagcatttctagctcccggattgaaaacagaaagaggatcgtacatccagggtccattttctgtaaatagaatcgtataatgtcccttcaagaagatatcagacgatccacaatcaaagaattggtctccgagtttgtaacaaactgcggactttaacctatacatgataccgtttagcatgatttctggtgatacgtcaatcggagtatcatctattagagatctaaagccggtgtaacattctccaccaaacatattcttattctgacgtcgttctacataaaacatcattgctccattaacgataacaggggaatgaacagcactacccatcacattagttcccaatggatcaatgtgtgtaactccagaacatcttccatatcctatgttaggaggagcgaacaccactcttccactattgccatcgaatgccatagaataaatatccttggaattgatagaaatcggactgtcggatgttgtgatcatcttcataggattaacaactatgtatggtgccgcctgaagtttcatatcgtaactgatgccgtttataggtctagccacagaaaccaacgtaggtctaaatccaactatagacaaaatagaagccaatatctgttcttcatctgtcataacttgagagcatccagtatgaataatcttcattagatggggatctaccgcatcatcatcgttacaataaaaaattcccattctaatgttcataattgcttttctaatcatggtatgcatgtttgctctctgaatctctgtggaaattagatctgatacacctgtaatcactatcggattatcctccgtaagacgattaaccaacaacatataattataagactttacttttctaaattcataaagttgctggattaggctataggtgtctccatgtacatacgcgttctcgagcgcaggaagtttaataccgaatagtgccatcagaataggatgaatatagtaattagtttctggttttctataaataaaagacaaatcttgtgaactagacatatcggtaaaatgcatggattggaatcgtgtagtcgacagaagaatatgatgattagatggagagtatattttatctaactctttgagttggtcaccgattctaggactagctcgagaatgaataagtactaaaggatgagtacatttcacagaaacactagcattgttcaatgtgctctttacatgggtaaggagttgaaatagctcgtttctatttgttctgacaatatttagtttattcataatgttaagcatatcctgaatagtaaagttagatgtgtcatacttgttagtagttagatatttagcaattgcattcccatcatttctcaatctcgtactccaatcatgcgtggatgctacttcgtcgatggaaaccatacaatcctttttgataggctgttgagattgattatttcctgcacgtttaggtttggtacgttgatttctagcccctgcggatataaagtcatcgtctacaattttggataatgaattgcatacactacaagacaaagatttatcagaagtgtgaatatgatcttcatctaccaaagaaagagtttgattagtataactagattttagtcctgcgttagatgttaaaaaaacatcgctattgaccacggcttccattatttatattcgtagtttttactcgaaagcgtgattttaatattcaatcttattacttttggaatcgttcaaaacctttgactaattgtagaatttgatctattgccctacgcgtatactcccttgcatcatatacgttcgtcaccagatcgtttgtttcggcctgaagttggtgcatatctctttcaacattcgacatgagatccttaagggccatatcgtctagattttgttgagatgctgctcctggatttggattttgttgtgctgttgtacatactgtaccaccagtaggtgtaggagtacatacagtggccacaataggaggttgaggaggtgtaaccgttggagtagtacaagaaatacttccatccgattgttgtgtacatgtagttgttggtaacgtctgagaaggttgggtagatggcggtgtcgtcgtcttttgatctttattaaatttagagataatatcctgaacagcattgctcggcgtcaacgctggaaggagtgaactcgccggcgcatcagtatctgcagacagccaatcaaaaagattagacatatcagatgatgtattagtttgttgtcgtggttttggtgtaggagccggtgtagctgttggaaccggctgtggagttatatgaatagttggttgtagcggttggataggctgtctgctggcggccatcatattatctctagctagttgttctcgcaactgtctttgataatacgactcttgagactttagtcctatttcaatcgcttcatcctttttcgtatccggatccttttcttcagaataatagattgacgactttggtgtagaggattctgccagcccctgtgagaacttgttaaagaagtccatttaaggctttaaaattgaattgcgattataagattaaatggcagacacagacgatattatcgactatgaatccgatgatctcaccgaatacgaggatgatgaagaagaggaagaagatggagagtcactagaaactagtgatatagatcccaaatcttcttataagattgtagaatcagcatccactcatatagaagatgcgcattccaatcttaaacatatagggaatcatatatctgctcttaaacgacgctatactagacgtataagtctatttgaaatagcgggtataatagcagaaagctataacttgcttcaacgaggaagattacctctagtttcagaattttctgacgaaacgatgaagcaaaatatgctacatgtaattatacaagagatagaggagggttcttgtcctatagtcatcgaaaagaacggagaattgttgtcggtaaacgattttgacaaagatggtctaaaattccatctagactatattatcaaaatttggaaacttcaaaaacgatattagaatttatacgaatatcgttctctaaatgtcacaatcaagtctcgcatgttcagcaatttattgtcgtactttatatcgtgttcattaacgatatcttgcaaaatagtaatgattctatcttccttcgatagatattcttcagagattattgtcttatattctttcttgttatcagatatgaatttgataagactttgaacattattgatacccgtctgtttaattttttctacagatattttagttttggcagattctatcgtatctgtcaatagacatccaacatcgacattcgacgtcaattgtctataaatcaacgtataaattttagaaataacattagcgaattgttgtgcattgatgtcgttattctgaaacagtatgattttaggtagcattttcttaacaaagagaacgtatttattgttactcagttgaacagatgatatatccagattactaacgcatctgattccatataccaaactttcagaagaaatggtgtacaattgtttgtattcattcaatgtctctttttcagaaattagtttagagtcgaatactgcaataattttcaagagatagttttcatcagataagattttatttagtgtagatatgataaaactattgttttgttggagaacttgatacgccgcgttctctgtagtcgacgctctcaaatgggaaacaatctccattatttttttggaatcggatacaatatcttcggtatcttgacgcaatctagtatacatagagttaagagaaattagagtttgtacattaagcaacatgtctctaaatgtggctgcaaacttttccttttccacatcatctagtttattatataccgatttcacaacggcaccagatttaaggaaccagaatgaaaaactctgataactacaatatttcatcatagttacgattttatcatcttctatagttggtgtaatagcgcatacctttttctccaagactggaaccaacgtcataaaaatgtttaaatcaaaatccatatcaacatctgatgcgctaagaccagtctcgcgttcaagattatctttactaatggtgacgaactcatcgtatagaactctaagtttgtccattatttatttacagatttagttgtttaatttatttgtgctcttccagagttgggatagtatttttctaacgtcggtattatattattaggatctacgttcatatgtatcataatattaatcatccacgttttgataaatctatctttagcttctgaaataacgtatttaaacaaaggagaaaaatatttagctacggcatcagacgcaataacattttttgtaaatgtaacgtatttagacgacagatcttcgttaaaaagttttccatctatgtagaatccatcggttgttaacaccattcccgcgtcagattgaataggagtttgaatagtttgttttggaaatagatccttcaataacttatagttgggtgggaaaaaatcgattttatcactagactctttcttttttactatcattacctcatgaactatttcttgaatgagtatatgtattttctttcctatatcggacgcgttcattggaaaatataccatgtcgttaactataagaatatttttatcctcgtttacaaactgaataatatcagatgtagttcgtaaacgaactatatcatcaccagcacaacatctaactatatgatatccactagtttcctttagtcgtttattatcttgttccatattagcagtcattccatcatttaagaaggcgtcaaagataatagggagaaatgacattttggattctgttacaactttaccaaaattaaggatatacggacttactatctttttctcaacgtcgatttgatgaacacacgatgaaaatgtacttcgatgagattgatcatgtagaaaacaacaagggatacaatatttccacatatcatgaaatatattaagaaatcccaccttattatatttccccaaaggatccatgcatgtaaacattatgccgttatcattaataaagacttctttctcatcggatctgtaaaagttgttactgatttttttcattccaggatctagataattaataatgatgggttttctattcttattctttgtattttggcatatcctagaccagtaaacagtttccactttggtaaaatcagcagacttttgaacgctattaaacatggcattaatggcaataactaaaaatgtaaaatatttttctatgttaggaatatggtttttcactttaatagatatatggtttttggccaaaatgatagatatttttttatccgaggatagtaaaatattattagtcgccgtctctataaaaatgaagctagtctcgatatccaattttattctagaattgataggagtcgccaaatgtaccttatacgttatatctcccttgatgcgttccatttgtgtatctatatcggacacaagatctgtaaatagttttacgttattaatcatcacggtatcgccgtcgctagataacgctaatgtaccatccaagtcccaaatggagagatttaactgttcatcgtttagaataaaatgattaccggtcatattaataaagtgttcatcgtatctagataacaacgacttataattaatgtccaagtcttgaactcgctgaatgatcttttttaacccagttagttttagattggtacgaaatatattgttaaactttgattctacagtaatgtccaaatctagttgtggaaatacttccatcaacattgtttcaaacttgataatattattatctacatcttcatacgatccaaattccggaatagatgtatcgcacgctctggccacccagataaccaaaaagtcacacgctccaggatatacattgtataaaaagctatcgttttttagtagtgtttttttctgagtatatacgaagggattaaaaatagtattatcaacgtaactatattccaaattattcttatgagaatagataataatatcgtccttaatatctaacaaatttcctaaatatccctttaattgagtcattcgaagcgtcaatagaatatgtctcttaactatttccggctgttgtatatttaaatgacttcgtaaaaaataatatatgggcgacttctcatctatgtaatcatatggagtgagatatagggctcgttctacctcctgccccttacccacctgtaataccaattgcggacttactatatatcgcatatttatatcgtggggtaaagtgaaaatctactaccgatgatgtaagtcttacaatgttcgaaccagtaccagatcttaatttggaggcctccgtagaactaggggaggtaaatatagatcaaacaacacctatgataaaggaaaatagcggttttatatcccgtagtagacgtctattcgcccatagatctaaggatgatgagagaaaactagcactacgattctttttacaaagactttattttttagatcatagagagattcattatttgttcagatgcgttgacgctgtaaaagacgtcactattaccaaaaaaaataacattatcgtggcgccttatatagcacttttaactatcgcatcaaaaggatgcaaacttacagaaacaatgattgaagcattctttccagaactatataatgaacatagtaagaaatttaaattcaactctcaagtatccatcatccaagaaaaactcggataccagtttggaaactatcacgtttatgattttgaaccgtattactctacagtagctctggctattcgagatgaacattcatctggcatttttaatatccgtcaagagagttatctggtaagttcattatctgaaataacatatagattttatctaattaatctaaaatctgatcttgttcaatggagtgctagtacgggcgctgtaattaatcaaatggtaaatactgtattgattacagtgtatgaaaagttacaactggtcatagaaaatgattcacaatttacatgttcattggctgtggaatcaaaacttccaataaaattacttaaagatagaaatgaattatttacaaaattcatcaacgagttaaaaaagaccagttcattcaagataagcaaacgcgataaggatacgctactaaaatattttacttaggactggagttagaatttatagacgactcatttcgtttatcattattagtattcttcttgttatcttgttcagaaatatacagcaatgctatgcctaatactaaatacattatcatgcttgcaatggctctaacaacgacgaaccaaaatgaatttggtcgtagcttttgttcacaaaaatacataaagaaatgtctacataaatctatggcgccattggctacttgaaatagcgccagtcctcctacagattttaatatagctgtataacatgacatttattcatcatcaaaagagacagagtcaccatctgtcatatttagattttttttcatgtgttcaaagtatcctctactcatttcattataatagtttatcatacttagaattttaggacggatcaatgagtaagacttgactagatcgtcagtagtaatttgtgcatcgtctattctgcatccgcttcgtcgaataatgtatagcatcgctttgagattctccatagctatcaagtctttatacaatgacatggaaatatctgtgaatactttatacttctccaacatcgatgccttaacatcatcgcctactttagcattgaaaatacgttctattgtgtagatggatgtagcaagatttttaaacaacaatgccatcttacacgatgattgcctcaagtctccaatcgtttgtttagaacgattagctacagagtccaatgcttggctgactagcatattattatctttagaaattgtattcttcaatgaggcgtttatcatatctgtgatttcgttagtcatattacagtctgactgggttgtaatgttatccaacatatcacctatggatacggtacacgtaccagcatttgtaataatcctatctaagatgttgtatggcattgcgcagaaaatatcttctcctgtaatatttccactctcgataaatctactcagattattcttaaatgccttattctctggagaaaagatatcagtgtccatcatttcattaatagtatacgcagaaaagataccacgagtatcaattctatccaagatacttatcggttccgagtcacagataatggtttcctctccttcgggagatcctgcatagaaatatctaggacaatagtttctatactgtctgtaactctgataatctctaaagtcactaactgataccatgaaattgagaagatcaaacgctgaagtaattaatttttctgcctcgtttttactacaactagttttcatcaatgtagtgacgatgtattgtttagttacttttggtctaatactgatgatagagatattattacttcccataatggatcttctagtagtcaccttaaagcccattgatgcaaatagcagatagataaagtcttggtatgactcctttctaatatagtacggactacctttgtcacccaactttatacccacataagccataacaacctctttaatagccgtttcatgaggtttatcagccatgagcctgagtagttggaagaatctcatgaatcctgtctcagaaagtcctatatgcatgatagatttatctttcctgggaaactctcgtatagtcatagatgaaatactcttcaaagtttctgaaataagattagtaacagtcttacctccgactactctaggtaacaaacaaactctaataggtgttttctctgcggagataatatcagaaaggatagagcaataagtagtattattgtgattataaagaccgaatacataacaggtagaatttataaacatcatgtcctgaaggtttttagacttgtattcctcgtaatccataccgtcccaaaacatggatttggtaactttgatagccgtagatctttgttccttcgccaacaggttaaagaaattaataaagaatttgtggtttctacctatgtctacaaattgcacgtttggaagcgccacggttacattcactgcagcattttgaggatcgcgagtatgaagtacgatgttattgtttactggtatatctggaaagaattctaccagtctaggaataagagattgatatcgcatagaaatacaaaagttcataatctcatcatctaagagcattttgttaccattgtaataaatatccactctgtcatatgtataaatgaagtactgttcaaacatgatgagatgtttatatgttggcatagtagtgagatctacgtttggtaatggcaatgtattaagattaactccataatgtctagcagcatctgcgatgttataagcgttgtcaaagcggggtcgatcttgtgctgttatatattgtctaacacctataagattatcaaaatcttgtctgcttaatacaccgttaacaatttttgccttgaattcttttattggtgcattaataacatccttatagaggatgttaaacaaataagtgttatcaaagttaagatctggatatttcttttctgctagaacatccattgagtcggagccatctggtttaatataaccaccgataaatctagctctgtattctgtatccgtcaatctaatattaagaaggtgttgagtgaaaggtggaagatcgtaaaagctgtgagtattaatgataggattagtttccgaactaatgttaattggggtattaataatatctatatttccagcgttaagtgtaacattaaacagttttaattcacgtgacgtggtatcaattaaataattaatgcccaatttggatatagcagcctgaagctcatcttgtttagttacggatcctaatgagttattaagcaatatatcgaacggatgaacgaaggttgttttaagttggtcacatactttgtaatctagacatagatgcggaagaacggtagaaactatacgaaataaatattcagagtcctctaattgatcaagagtaactattgacttaataggcatcatttatttagtattaaatgacgaccgtaccagtgacggatatacaaaacgatttaattacagagttttcagaagataattatccatctaacaaaaattatgaaataactcttcgtcaaatgtctattctaactcacgttaacaacgtggtagatagagaacataatgccgccgtagtgtcatctccagaggaaatatcctcacaacttaatgaagatctatttccagatgatgattctccggccactattatcgaacgagtacaacctcatactactattattgacgatactccacctcctacgtttcgtagagagttattgatatcggaacaacgtcaacaacgagaaaaaagatttaatattacagtatcgaaaaatgctgaagcaataatggaatctagatctatgatatcttctatgccaacacaaacaccatccttgggagtagtttatgataaagataaaagaattcagatgttggaggatgaagtggttaatcttagaaatcaacgatctaatacaaaatcatctgataatttagataattttaccagaatactatttggtaagactccgtataaatcaacagaagttaataagcgtatagccatcgttaattatgcaaatttgaacgggtctcccttatcagtcgaggacttggatgtttgttcagaggatgaaatagatagaatctataaaacgattaaacaatatcacgaaagtagaaaacgaaaaattatcgtcactaacgtgattattattgtcataaatattatcgagcaagcattgctaaaactcggatttgaagaaatcaaaggactgagtaccgatatcacttcagaaattatcgatgtggagatcggagatgactgcgatgctgtagcatcaaaactaggaatcggtaacagtccggttcttaatattgtattgtttatactcaagatattcgttaaacgaattaaaattatttaatttaatacattcccatatccagacaacaatcgtctggattaatctgttcctgtcgtctcataccggacgacatattaatctttttattagtaggcatctttttagatggtttctttttcccagcattaactgagtcgatacctagaagatcgtgattgatctctccgaccattccacgaacttctaattggccgtctctgacggtaccataaactattttaccagcattagtaacagcttggacaatctgaccatccatcgcattgtacgatgtagtagtaactgttgttctacgtctaggagcaccagaagtatttttggagcccttggatgttgatgtagaagaagacgaggattttgattttggtttacatgtaatacattttgtatcacatgcgccggcagtcacatctgtttgagaattaagattattgttgcctcctttgacggctgcatctccaccgatttgcgctagtagatttttaagctgtggtgtaatcttattaactgtttcgatataatcatcgtaactgcttctaacggctaaattttttttatccgccatttagaagctaaaaatatttttatttatgcagaagatttaactagattatacaatgaactaatatgatccttttccagattatttacaaacttggtattttttggttctggaggaggcgaatttaaattcggacttggatttggattttgtgggttcttgatcttattatacagcgcatataggatggcgacggtaactgctacgcaaataccgatcaacaaaagaataccaatcatttattgacaataacttcactattgatcaagtatgcaatatatcatcttttcactaaataagtagtaataatgattcaacaatgtcgagatatatggacgataataatttagttcatggaaatatcgctatgattggtatgaatgactccgctaactctgtggggcgcgcagtgctttccccacatagaataaattagcattccgactgtgataataataccaagtataaacgccataatactcaatactttccatgtacgagtgggactggtagacttactaaagtcaataaaggcgaagatacacgaaagaatcaaaagaatgattccagcgattagcacgccggaaaaataatttccaatcataagcatcatatccatttaactaataaaaattttaaatcgccgaatgaacaaagtggaatataaaccatataaaaacaatagtttgtactgcaaaaataatatctatttttgttttcgaagatatggtaaaattaaatagtagtacacagcatgttataactaacagcagcaacggctcgtaattacttatcatttactagacgaaaaggtggtgggatattttcttgctcaaataatacgaatatatcacccatccattttatgcgatgtttatatactctaatctttaatagatctatagacgacgggtttaccaacaatatagattttatcgattcatctaatttaaacccttccttaaacgtgaatgatctattatctggcataacgatgactctacccgatgaatcggacaatgtactgggccatgtagaataaattatcaacgaattatcgtctacgaacatttatatcatttgttttaattttagtacgcgaataaatagatataaaatagaaaataacagatattacaaccaatgttatggccgcgcccaaccaggtaggcagttttattttatcttttactacaggttctcctggatgtacgtcaccaacggcggacgtagttctagtacaattagacgtaagttccgcttgggaattttttaacgctaaagagttaacgttaatcgtgcacccaacgtatttacatctagttctttgaacatcttgattataatataaccattttctatctctagattcgtcggtgcactcatgtaaccaacataccctaggtcctaaatatttatctccggaattagattttggataattcgcgcaccaacaatttctatttcctttatgatcgttacaaaagacgtataatgccgtatccccaaaagtaaaataatcaggacgaataattctaataaactcagaacaatatctcgcatccatatgtttggagcaaatatcggaataagtagacatagccggtttccgttttgcacgtaaccattctaaacaattggggtttccaggatcgtttctacaaaatccagtcatgaaatcatcacaatgttctgtcttgtaattattattaaatatttttggacagtgtttggtatttgtcttagaacaacattttgccacgctatcactatcgcccaggagataatccttttttataaaatgacatcgttgcccggatgctatataatcagtagcgtgttttaaatccttaatatattcaggagttacctcgttctgataatagattaatgatccaggacgaaatttgaaagaactacatggttctccatgaattaatacatattgtttagcaaattcaggaactataaaactactacaatgatctatcgacataccatctatcaaacaaaacttgggtttaatttctcccggagatgtttcataatagtacgtataactttcttctgcaaacttaacagctctattatattcaggataattaaaacctaattccatatatttgtctcgtatatctgctattcctggtgctattttgattctattaagagtaacggctgcccccatttttaataatcgtcagtatttaaactgttaaatgttggtatatcaacatttaccttatttcccgcagtataaggtttgttgcaggtatactgttcaggaatggttacatttatactttttctatagtcctgtctttcgatgttcatcacatatgcaaagaacagaataaacaaaataatgtaagaaataatattaaatatctgtgaattcgtaaatacattgattgccataataattacagcagctacaatacatacaatagacattcccacagtgttgccattacctccacgatacatttgagttactaagcaataggtaataactaagctagtaagaggcaatagaaaagatgagataaatatcatcaatatagagattagaggagggctatatagagccaagacgaacaaaatcaaaccgagtaacgttctaacatcattatttttgaagattcccaaataatcattcattcctccataatcgttttgcatcatacctccatctttaggcataaacgattgctgctgttcctctgtaaataaatctttatcaagcactccagcacccgcagagaagtcgtcaagcatattgtaatatcttaaataactcatttatatattaaaaaatgtcactattaaagatggagtataatctttatgccgaactaaaaaaaatgacttgtggtcaacccctaagtctttttaacgaagacggggatttcgtagaagttgaaccgggatcatcctttaagtttctgatacctaagggattttacgcctctccttccgtaaagacgagtctagtatttgaaacattaacaacgaccgataataaaattactagtatcaatccaacaaatgcgccaaagttatatcctcttcaacgcaaagtcgtatctgaagtagtttctaatatgaggaaaatgatcgaatcaaaacgtcctctatacatcactcttcacttggcgtgtggatttggtaagactattaccacgtgttatcttatggctacacacggtagaaaaaccgtcatttgcgtacccaataaaatgttaatacatcaatggaagacacaggtagaggcagtcggattggaacataagatatccatagatggagtaagtagtctattaaaggaactaaagactcaaagtccggatgtattaatagtagtcagtagacatctgacaaacgatgccttttgtaaatatatcaataagcattatgatttgttcatcttggatgaatcacatacgtataatctgatgaacaatacagcagttacaagatttttagcgtattatcctccgatgatgtgttattttttaactgctacacctagaccatctaacagaatttattgtaacagtattattaatattgccaagttatccgatctaaaaaaaactatctatgcagtagatagtttttttgagccatattccacagataatattagacatatgataaaacgattagatggaccatctaataaatatcatatatataccgagaagttattatctgtagacgagcctagaaatcaacttattcttaataccctggtagaagaattcaagtcaggaactattaatcgcattttagttattactaaactacgtgaacatatggtattcttctacaaacgattattagattttttcggatcagaggttgtatttataggagacgcccaaaatagacgtactccagatatggtcaaatcaatcaaggaactaaatagatttatattcgtatccaccttattttattccggtactggtttagatattcctagtttggattctttgttcatttgctcggcagtaatcaacaatatgcaaatagagcaattactagggagggtatgtcgagaaacagaactattagataggacggtatatgtatttcctagcacatccatcaaagaaataaagtacatgataggaaatttcgttcaacgaattattagtctgtctgtagataaactaggatttaaacaaaaaagttatcggaaacatcaagaatccgatcccacttctgtatgtacaacatcctccagagaagaacgtgtattaaatagaatatttaactcgcaaaatcgttaagaagtttaagcgacgatccgcatgctgcgcaggccagtgtattacccctcatagtattaatataatccaatgatacttttgtgatgtcggaaatcttaaccaatttagactgacaggcagaacacgtcatgcaatcatcatcgtcatcgataactgtagtcttgggcttctttttgcggctcttcattccggaacgcacattggtgctatccatttaggtagtaaaaaataagtcagaatatgccctatagcacgatcgtgcaaaacctggtatatcgtctctatctttatcacaatatagtgtatcgacatctttattattattgacctcgtttatcttggaacatggaatgggaacatttttgttatcaacggccacctttgccttaattccagatgttgtaaaattataactaaacagtctatcatcgacacaaatgaaattcttgtttagacgtttgtagtttacgtatgcggctcgttcgcgtctcattttttcagatattgcaggtactataatattaaaaataagaatgaaataacataggattaaaaataaagttatcatgacttctagcgctgatttaactaacttaaaagaattacttagtctgtacaaaagtttgaaattttcagattctgcggctatagaaaagtataattctttggtagaatggggaacatctacttactggaaaataggcgtgcaaaaggtagctaatgtcgagacgtcaatatctgattattatgatgaggtaaaaaataaaccgtttaatattgatccgggctattacattttcttaccggtatattttgggagcgtctttatttattcgaagggtaaaaatatggtagaacttggatctggaaactcttttcaaataccagatgatatgcgaagtgcgtgtaacaaagtattagacagcgataacggaatagactttctgagatttgttttgttaaacaatagatggataatggaagatgctatatcaaaatatcagtctccagttaatatatttaaactagctagtgagtacggattaaacatacccaaatatttagaaattgaaatagaggaagacacattatttgacgacgagttatactctattatagaacgctctttcgatgataaatttccaaaaatatccatatcgtatattaagttgggagaacttaggcggcaagttgtagactttttcaaattctcattcatgtatattgagtccatcaaggtagatcgtataggagataatatttttattcctagcgttataacaaaatcaggaaaaaagatattagtaaaagatgtagaccatttaatacgatccaaggttagagaacatacatttgtaaaagtaaaaaagaaaaacacattttccattttatacgactatgatggaaacggaacagaaactagaggagaagtaataaaacgaattatagacactataggacgagactattatgttaacggaaagtatttctctaaggttggtagtgcaggcttaaagcaattgactaataaattagatattaatgagtgcgcaactgtcgatgagttagttgatgagattaataaatccggaactgtaaaacgaaaaataaaaaaccaatcagcatttgatttaagcagagaatgtttgggatatccagaagcggattttataacgttagttaataacatgcggttcaaaatagaaaattgtaaggttgtaaatttcaatattgaaaatactaattgtttaaataacccgagtattgagactatatatggaaactttaaccagttcgtctcaatctttaatatcgtcaccgatgtcaaaaaaagattattcgagtgaaataatatgcgcctttgatataggtgcaaaaaatcctgccagaactgttttagaagtcaaggataactccgttagggtattggatatatcaaaattagactggagttctgattgggaaaggcacatagctaaagatttgtcacaatatgaatacactacagttcttctagaacgtcagcctagaaggtcgccgtacgtcaaatttatctattttattaaaggctttttatatcatacatcggctgccaaagttatttgcgtctcgcctgtcatgtctggtaattcatatagagatcgaaaaaagagatcggtcgaagcatttcttgattggatggacacattcggattgcgagactccgttccggatagacgcaaattagacgatgtagcggatagtttcaatttggctatgagatacgtattagataaatggaatactaattatacaccttataataggtgtaaatctagaaattacataaaaaaaatgtaataacgttagtaacgccattatggataatctatttacctttctacatgaaatagaagatagatatgccagaactatttttaactttcatctaataagttgcgatgaaataggagatatatatggtcttatgaaagaacgcatttcctcagaggatatgtttgataatatagtgtataataaagatatacatcatgccattaagaaactagtgtattgcgacatccaacttactaaacacattattaatcagaatacgtatccggtatttaacgattcttcacaagtgaaatgttgtcattatttcgatataaactcagataatagcaatattagctctcgtacagtagagatatttgagagggaaaagtcatctcttgtatcatatattaaaactaccaataagaagagaaaggtcaattatggggaaataaagaaaactgtacatggaggcactaatgcaaattacttttccggtaaaaagtctgatgagtatctgagcactacagtcaggtccaacattaatcaaccttggatcaaaaccatttctaagagaatgagagtagatatcattaatcactctatagtaacgcgtggaaaaagctctatattacaaactatagaaattatttttactaatagaacatgtgtgaaaatattcaaggattctactatgcacattattctatccaaggacaaggatgaaaaggggtgtatacacatgattgacaaattattctatgtctattataatttatttctgttgttcgaggatatcatccaaaacgagtactttaaagaagtagctaatgttgtaaaccacgtactcacggctacggcattagatgagaaattattcctaattaagaaaatggctgaacacgatgtttatggagttagcaatttcaaaatagggatgtttaacctgacatttattaagtcgttggatcataccgttttcccctctctgttagatgaggatagcaaaataaagttttttaaggggaaaaagctcaatattgtagcattacgatctctggaggattgtataaattacgtgactaaatccgagaatatgatagaaatgatgaaggaaagatcgactattttaaatagcatagatatagaaacggaatcggtagatcgtctaaaagaattgcttctaaaatgaaaaaaaaacactaattcagaaatggatcaacgactcggatataagtttttggtgcctgatcctaaagccggagttttttatagaccgttacatttccaatatgtatcgtattctaattttatattgcatcgattgcatgaaatcttgaccgtcaagcggccactcttatcgtttaagaataatacagaacgaattatgatagaaattagcaatgttaaagtgactcctccagattactcacctataatcgcgagtattaaaggtaagagttatgacgcattagccacgttcactgtaaatatctttaaagaggtaatgaccaaagagggtatatccatcactaaaataagtagttatgagggaaaagattctcatttgataaaaattccgctactaataggatacgggaataaaaatccacttgatacagccaagtatcttgttcctaatgtcataggtggagtctttatcaataaacaatctgtcgaaaaagtaggaattaatctagtagaaaagattacaacatggccaaaatttagggttgttaagccaaactcattcactttctcgttttcctccgtatcccctcctaatgtattaccgacaagatatcgccattacaagatatctctggatatatcacaattggaagcgttgaatatatcatcgacaaagacatttataacggtcaatattgttttgctgtctcaatatttatctagagtgagtctagaattcattagacgtagtttatcatacgatatgcctccagaagttgtctatctagtaaacgcgataatagatagtgctaaacgaattactgaatctattactgactttaatattgatacatacattaatgacctggtggaagctgaacacattaaacaaaaatctcagttaacgatcaacgagttcaaatatgaaatgctgcataactttttacctcatatgaactatacacccgatcaactaaagggattttatatgatatctttactaagaaagtttctctactgtatctaccacacttctagatatccagatagagattcgatggtttgtcatcgcatcctaacgtacggcaaatattttgagacgttggcacatgatgaattagagaattacataggcaacatccgaaacgatatcatgaacaatcacaagaacagaggcacttacgcggtaaacattcatgtactaacaactcctggacttaatcatgcattttctagtctattgagtggaaagttcaaaaagtcagacggtagttatcgaacacatcctcactattcatggatgcagaatatttctattcctaggagtgttggattttatccggatcaagtaaagatttcaaagatgttttctgtcagaaaataccatccaagtcaatatctttacttttgttcatcggacgttccggaaagaggtcctcaggtaggtttagtatctcaattgtctgtcttgagttccattacaaatatactaacgtctgagtatttggatttggaaaagaaaatttgtgagtatatcagatcatattataaagatgatataagttactttgaaacaggatttccaatcactatagaaaatgctctagtcgcatctcttaatccaaatatgatatgtgattttgtaactgactttagacgtagaaaacggatgggattcttcggtaacttggaggtaggtattactttagttagggatcacatgaatgaaattcgcattaatattggagcgggaagattagtcagaccattcttggttgtggataacggagagctcatgatggatgtgtgtccggagttagaaagcagattagacgacatgacattctctgacattcagaaagagtttccgcatgtcatcgaaatggtagatatagaacaatttacttttagtaacgtatgtgaatcggttcaaaaatttagaatgatgtcaaaggatgaaagaaagcaatacgatttatgtgactttcctgccgaatttagagatggatatgtagcatcttcactagtgggaatcaatcacaattctggacccagagctattcttggatgtgctcaagctaaacaagctatctcttgtctgagctcggatatacgaaataaaatagacaatggaattcatttgatgtatccagagaggccaatcgtgattagtaaggctttagaaacttcaaagattgcggctaattgcttcggccaacatgttactatagcattaatgtcgtacaaaggtatcaatcaagaggatggaattatcatcaaaaaacaatttattcagagaggcggtctcgatattgttacagccaagaaacatcaagtagaaattccgttggaaaactttaataacaaagaaagagataggtctaacgcctattcaaaattagaaagtaatggattagttagactgaatgctttcttggaatccggagacgctatagcacgaaatatctcatcaagaactcttgaagatgattttgctagagataatcagattagctttgatgtttccgaaaaatataccgatatgtacaaatctcgcgttgaacgagtacaagtagaacttactgacaaagttaaggtacgagtattaaccatgaaagaaagaagacccattctaggagacaaatttaccactagaacgagtcaaaagggaacagtcgcgtatatcgcggatgaaacggaacttccatacgatgaaaatggtatcacaccagatgtcattattaattctacatccatcttctctagaaaaactatatctatgttgatagaggttattttaacagccgcatattctgctaagccgtacaacaataagggagaaaaccgacctgtctgttttcctagtagtaacgaaacatccatcgatacatatatgcaattcgctaaacaatgttatgagcattcaaatccgaaattgtctgatgaagaattatcggataaaatcttttgtgaaaagattctctatgatcctgaaacggataagccttatgcatccaaagtattttttggaccaatttattacttgcgtctgaggcatttaactcaggacaaggcaaccgttagatgtagaggtaaaaagacgaagctcattagacaggcgaatgagggacgaaaacgtggaggaggtatcaagttcggagaaatggagagagactgtttaatagcgcatggtgcagccaatactattacagaagttttgaaagattcggaagaagattatcaagatgtgtatgtttgtgaaaattgtggagacatagcagcacaaatcaagggtattaatacatgtcttagatgttcaaaacttaatctctctcctctcttaacaaaaattgataccacgcacgtatctaaagtatttcttactcaaatgaacgccagaggcgtaaaagttaaattagatttcgaacgaaggcctccttcgttttataaaccattagataaagttgatctcaaaccgtcttttctggtgtaatattctagtttggtagtagatacatatcaatatcatcaaattcgagatccgaattataaaatgggcgtggattgttaactatagaatcggacgtctgatattcgaaaatctgtggagttttaggttttggtggaggtgtaactgctacttgggatactgaagtctgatattcagaaagctgggggatgttctggttcgacatccaccgatggtgtcacatcactaatcggttcggtaacgtctgtggacgatggaggcaccacttctacaggttctggttctttatcctcagtcatcaacggagctacttcaatgcgaggaaatgtataatttggtaatggtttctcatgtggatctgaagaagaggtaagatatctactagaaagataccgatcacgttctagttctcttttgtagaacttaactttttctttctccgcatctagttgatattccaacctcttcacgttcgcatgggttacctccgcagtttttacgagcgatttcacgttcagccttcatgcgtcttatagcatgaattcgcttatcgttatcgggtttagcttctgtcaccttagcaattccttttttattaaactctacataatcatatccatttctattgtttgttctaatataaacgagtatagcatcattgctaaatttttcaatagtatcgaaaacagaatatcctaaaccatataatatatattcaggaacactcaaactaaatgtccaggattctcctaaatacgtaaactttaatagtgcgaaatcattcaaaaatctaccacttatagatagatagatagtacataaatgcgtatagtagtctacctatctctttattatgaaaaccggcattacgatcatatatgtcgtgatatacctgtgatccgtttacgttaaaccataaatacatgggtgatcctataaacatgaatttatttctaattctcagagctatagttaattgaccgtgtaatatttgcttacatgcatacttgatacgatcattaataagatttttatcattgctcgttatttcagaatcgtatatataaggagtaccatcgtgattcttaccagatattatacaaaatactatatataaaatatattgacccacgttagtaatcatgtaaatgtttaacgttttaaattttgtattcaatgatccattatcatacgctagcatggtcttatgatattcattctttaaaatataatattgtgttagccattgcattggggctcctaatggagattttttattctcatccattttaggataggctttcataaagtccctaataacttcgtgaataatgtttctatgttttctactgatgcatgtatttgcttcgatttttttatcccatgtttcatctatcatagatttaaacgcagtaatgctcgcaacattaacatcttgaaccgttggtacaattccgttccataaatttataatgttcgccatttatataactcattttttgaatatacttttaattaacaaaagagttaagttactcatatggacgccgtccagtctgaacatcaatctttttagccagagatatcatagccgctcttagagtttcagcgtgattttccaacctaaatagaacttcatcgttgcgtttacaacacttttctatttgttcaaactttgttgttacattagtaatctttttttccaaattagttagccgttgtttgagagtttcctcattgtcgtcttcatcggctttaacaattgcttcgcgtttagcctctggctttttagcagccgttgtagaaaaaaattcagttgctggaattgcaagatcgtcatctccggggaaaagagttccgtccatttaaagtacagattttagaaactgacactctgcgttatttatatttggtacaacacatggattataaatattgatgttaataacatcagaaaatgtaaagtctatacattgttgcatcgtgttaaattttctaatggatctagtattattgggtccaacttctgcctgaaatccaaatatggaagcggatacaaaaccgtttcctggataaaccacacatctccacttttgctttacatcagaaattgtgtcgttgacatcttgaactctcctatctaatgccggtgttccacctatagattttgaatattcgaatgctgcatgagtagcattaaattccttaatattgccataattttcatatattgagtaaccctggataaaaagtaaacacaccgcagccgtagctaccacaataaaaaaaattgatagagagttcatttataatctattagaagctgacaaaatttttttacacgcatcagacaatgctttaataaatagttcaacatctacttttgtcatatcgaaccgatggtatgattctaacctagaattacatccgaaaaagttgactatgttcatagtcattaagtcattaacaaacaacattccagactctggattataagacgatactgtttcgtcacaattacctaccttaatcatgtgattatgaatattggctattagagcaccttctaagaaatctataatatctttgaaacacgatttaaaatcaaaccacgaatatacttctacgaagaaagttagtttacccataggagaaataactataaatggagatctaaatacaaaatccggatctatgatagttttaacattattatattctctattaaatacctccacatctaaaaatgttaattttgaaactatgtcttcgtttattaccgtacctgaactaaacgctataagctctattgtttgagaactctttaaacgatattcttgaaatacatgtaacaaagtttcctttaactcggtcggtttatctaccatagttacagaatttgtatccttatctataatataataatcaaaatcgtataaagttatataattatcgcgttcagattgggatcttttcaaatagactaaaaaccccatttctctagtaagtatcttatgtatatgtttgtaaaatatcttcatggtgggaatatgctctaccgcagttagccattcctcattgacagcggtagatgtattagacaaaactattccaatgtttaacaagggccattttacgagattattaaatccttgtttgataaatgtagccaatgagggttcgagttcaacgacgattgaattctcttcccgcggatgctgcatgatgaacgacgggatgttgttcgattgatttggaattctttttcgactttttgtttatattaaatattttaaaatttatagcggatagcaattcatgtaccacggataatgtagacgcgtattgcgcatcgatatctttattattagataaatttatcaataaatgtgagaagtttgcctcgttaaggtcttccatttaaatattatataaacatttgtgtttgtatcttattcgtcttttatggaatagttttttactagtaaagctgcaattacacactttgtccgtaaaacataaatataaacaccagcttttatcaatcgttccaaaaagtcgacggcggacatttttaacatggcatctattttaaatacacttaggtttttggaaaaaacatcattttataattgtaacgattcaataactaaagaaaagattaagattaaacataagggaatgtcatttgtattttataagccaaagcattctaccgttgttaaatacttgtctggaggaggtatatatcatgatgatttggttgtattggggaaggtaacaattaatgatctaaagatgatgctattttacatggatttatcatatcatggagtgacaagtagtggaacaatttacaaattgggatcgtctatcgatagactttctctaaataggactattgttacaaaagttaataattataattatgatacattttttgacgatgatgattgatcgctattgcacaattttgtttttttactttctaatatagcgtttagattctttttcatgtgcgaatattgatttactaaaatatctatgtttaacttttgttctataacgtccttatcggcggtatcggtacatatacgtaattcaccttcacaaaatacggagtcttcgataataatagccaatcgattattggatctagctgtctgtatcatattcaacatgtttaatatatcctttcgtttcccctttacaggcatcgatcgtagcatattttccgcgtctgagatggaaatgttaaaactacaaaaatgcgtaatgttagcccgtcctaatattggtacgtgtctataagtttggcatagtagaataatagacgtgtttaaatgccttccaaagtttaagaattctattagagtattgcattttgatagtttatcgcctacatcatcaaaaataagtaaaaagtgtgctgattttttatgattttgtgcgacagcaatacatttttctatgttacttttagttcgtatcagattatattctagagattcctgactactaacgaaattaatatgatttggccaaatgtatccatcataatctggattataaacgggtgtaaacaagaatacatgtttatattttttaactagtgtagaaaacagagatagtaaatagatagtttttccagatccagatcctcccgttaaaaccattctaaacggcatttttaataaattttctcttgaaaattgtttttcttggaaacaattcataattatatttacagttactaaattaatttgataataaatcaaaatatggaaaactaaggtcgttagtagggaggagaacaaagaaggcacatcgtgacataaataacatttattatcatgatgacaccagaaaacgacgaagagcagacatctgtgttctccgctactgtttacagagacaaaattcagggaaagaataaacgcaaacgcgtgattggtctatgtattagaatatctatggttatttcactactatctatgattaccatgtccgcgtttctcatagtgcgcctaaatcaatgcatgtctgctaacgaggctgctattactgacgccgctgttgccgttgctgctgcatcatctactcatagaaaggttgcgtctagcactacgcaatatgatcacaaagaaagctgtaatggtttatattaccagggttcttgttatatattacattcagactaccagttattctcggatgctaaagcaaattgcactgcggaatcatcaacactacccaataaatccgatgtcttgactacctggctcattgattatgttaaggatacatggggatctgatggtaatccaattacaaaaactacatccgattatcaagattctgatgtatcacaagaagttagaaagtatttttgtgttaaaacaatgaactaatatttatttttgtacattaataaatgaaatcgcttaatagacaaactgtaagtaggtttaagaagttgtcggtgccggtcgctataatgatgatactctcaaccattattagtggcataggaacatttctgcattacaaagaagaactgatgcctagtgcttgcgccaatggatggatacaatacgataaacattgttatttagatactaacattaaaatgtctacagataatgcggtttatcagtgtcgtaaattacgagccagattgcctagaccggatactagacatctgagagtattgtttagtattttttataaagattattgggtaagtttaaaaaagaccaatgataaatggttagatattaataatgataaagatatagatattagtaaattaacaaattttaaacaactaaacagtacgacggatgctgaagcgtgttatatatacaagtctggaaaactggttaaaacagtatgtaaaagtactcaatctgtactatgtgttaaaaaattctacaagtgacaacaaaaaatgaattaataataagtcgttaacgtacgccgccatggacgccgcgtttgttattactccaatgggtgtgttgactataacagatacattgtatgatgatctcgatatctcaatcatggactttataggaccatacattataggtaacataaaaactgtccaaatagatgtacgggatataaaatattccgacatgcaaaaatgctactttagctataagggtaaaatagttcctcaggattctaatgatttggctagattcaacatttatagcatttgtgccgcatacagatcaaaaaataccatcatcatagcatgcgactatgatatcatgttagatatagaagataaacatcagccattttatctattcccatctattgatgtttttaacgctacaatcatagaagcgtataacctgtatacagctggagattatcatctaatcatcaatccttcagataatctgaaaatgaaattgtcgtttaattcttcattctgcatatcagacggcaatggatggatcataattgatgggaaatgcaatagtaattttttatcataaaagttgtaaagtaaataataaaacaataaatattgaactagtagtacgtatattgagcaatcagaaatgatgctggtacctcttatcacggtgaccgtagttgcgggaacaatattagtatgttatatattatatatttgtaggaaaaagatacgtactgtctataatgacaataaaattatcatgacaaaattaaaaaagataaagagttctaattccagcaaatctagtaaatcaactgatagcgaatcagactgggaggatcactgtagtgctatggaacaaaacaatgacgtagataatatttctaggaatgagatattggacgatgatagcttcgctggtagtttaatatgggataacgaatccaatgttatggcgcctagcacagaacacatttacgatagtgttgctggaagcacgctgctaataaataatgatcgtaatgaacagactatttatcagaacactacagtagtacttaatgaagataccaaacagaatcctaactattcatccaatcctttcgtaaattataataaaaccagtatttgtagcaagtcaaatccgttcattacagaactcaacaataaatttagtgagaataatccgtttagacgagcacatagcgatgattatcttaataagcaagaacaagatcatgaacacgatgatatagaatcattggtgtgattagtttcctttttataaaattgaagtaatatttagtattattgctgccgtcacgttgtacaaatggagatattccctgtattcggcatttctaaaattagcaattttattgctaataatgactgtagatattatatagatacagaacatcaaaaaattatatctgatgagatcaatagacagatggatgaaacggtacttcttaccaacatcttaagcgtagaagttgtaaatgacaatgagatgtaccatcttattcctcatagattatcgacgattatactctgtattagttctgtcggaggatgtgttatctctatagataatgacgtcaatggcaaaaatattctaacctttcccattgatcatgctgtaatcatatccccactgagtaaatgtgtcgtagttagcaagggtcctacaaccatattggttgttaaagcggatatacctagcaaacgattggtaacatcgtttacaaacgacatactgtatgtaaacaatctatcactgattaattattcgccgttgtctgtattcattattagacgagttaccgactatttggatagacacatatgcgatcagatatttgcgaataataagtggtattccattataaccatcgacaataagcagtttcctattccatcaaactgtataggtatgtcctctgccaagtacataaattctagcatcgagcaagatactttaatacatgtttgtaacctcgagcatccattcgacttagtatacaaaaaaatgcagtcgtacaattctgtacctatcaaggaacaaatattgtacggtagaattgataatataaatatgagcattagtatttctgtggattaatagatttctagtatggggatcattaatcatctctaatctctaaatacctcataaaacgaaaaaaaagctattatcaaatactgtacggaatggattcattctcttctctttttatgaaactctgttgtatatctactgataaaactggaagcaaaaaatctgataaaaagaataagaataagatcaaggattattataaaataacaatagttcctggttcctcttccacgtctactagctcgtggtattatacacatgcctagtaatagtctctttgcgttgacggaaagcagactagaaataacaggctaaaatgttcagacaccataatagttcccaacccagataataacagagtaccatcaacacattcctttaaactcaatcccaaacccaaaaccgttaaaatgtatccggccaattgatagtagataatgaggtgtacagcgcatgatgatttacacagtaaccaaaatgaaaatactttagtaattataagaaatatagatggtaacgtcatcatcaacaatccaataatatgccggagagtaaacattgacggataaaacaaaaatgctccgcataactctatcatggcaataacacaaccaaatacttgtaagattcctaaattagtagaaaatacaacggatatcgatgtataagtgatctcgagaaataataagaataaagtaatgcccgtaaagataaacatcaacattgtttggtaatcattaaaccaattagtatgaagttgaactaatttcacagtagattttattccagtattatccccgcatgtataagtacctggtaagatatctttatattccataatcaatgagacatcactatctgataacgaatgaagtctagcactagtatgccatttacttaatattgtcgtcttggaagttttattataagttaaaatatcatggttatccaatttccatctaatatactttgtcggattatctatagtacacggaataatgatggtatcattacatgctgtatactctatggtctttgtagttgttataacaaccaacgtatagaggtatatcaacgatattctaactcttgacattttttatttatttaaaatgatacctttgttatttattttattctattttgctaacggtattgaatggcataagtttgaaacgagtgaagaaataatttctacttacttattagacgacgtattatacacgggtgttaatggggcggtatacacattttcaaataataaactaaacaaaactggtttaactaataataattatataacaacatctataaaagtagaggatgcggaaccaataacggaaatcccaaatgttggaaaatagacggttcagacgacccaaaacatagaggtagaggatacgctccttatcaaaatagcaaagtaacgataatcagtcacaacggatgtgtactatctgacataaacatatcaaaagaaggaattaaacgatggagaagatttgacggaccatgtggttatgatttatacacggcggataacgtaattccaaaagatggtttacgaggagcattcgtcgataaagatggtacttatgacaaagtttacattcttttcactgatactatcggctcaaagagaattgtcaaaattccgtatatagcacaaatgtgcctaaacgacgaaggtggtccatcatcattgtctagtcatagatggtcgacgtttctcaaagtcgaattagaatgtgatatcgacggaagaagttatagacaaattattcattctagaactataaaaacagataatgatacgatactatatgtattcttcgatagtccttattccaagtccgcattatgtacctattctatgaataccattaaacaatctttttctacgtcaaaattggaaggatatacaaagcaattgccgtctccagctcctggtatatgtttaccagctggaaaagttgttccacataccacgtttgaagtcatagaaaaatataatgtactagatgatattataaagcctttatctaaccaacctatcttcgaaggaccgtctggtgttaaatggttcgatataaaggagaaggaaaatgaacatcgggaatatagaatatacttcataaaagaaaattctatatattcgttcgatacaaaatctaaacaaactcgtagctcgcaagtcgatgcgcgactattttcagtaatggtaacttcgaaaccgttatttatagcagatatagggataggagtaggaatgccacaaatgaaaaaaatacttaaaatgtaatcttaatcgagtacaccgcacgacaatgaacaaacataagacagattatgctggttatgcttgctgcgtaatatgcggtctaattgttggaattatttttacagcgacactattaaaagttgtagaacgtaaattagttcatacaccatcaatagataaaacgataaaagatgcatatattagagaagattgtcctactgactggataagctataataataaatgtatccatttatctactgatcgaaaaacctgggaggaaggacgtaatgcatgcaaagctctaaatccaaattcggatctaattaagatagagactccaaacgagttaagttttttaagaagcattagacgcggatattgggtaggagaatccgaaatattaaaccagacaaccccatataattttatagctaaaaatgccacgaagaatggaactaaaaaacggaaatatatttgtagtacaacgaatactcccaaactacatttttatcataccactacttcggttagatgttttagaaaaaaataaatatcgccgtaccgttcttgtttttataaaaataacaattaacaattatcaaattttttctttaatattttacgtggttgaccattcttggtggtaaaataatctcttagtgttggaatggaatgctgtttaatgtttccgcactcatcgtatattttgacgtatgcagtcacatcgtttacgcaatagtcagactgtagttctatcatgcttcctacatcagaaggaggaacagttttaaagtctcttggttttaatctattgccattagttttcatgaaatcctttgttttatccacttcacattttaaataaatgtccactatacattcttctgttaattttactagatcgtcatgggtcatagaatttataggttccgtagtccatggatccaaactagcaaacttcgcgtatacggtatcgcgattagtgtatacaccaactgtatgaaaattaagaaaacagtttaataaatcaacagaaatatttaatcctccgtttgatacagatgcgccatatttatggatttcggattcacacgttgtttgtctgaggtgttcgtctagtgttgcttctacgtaaacttcgattcccatatattctttattgtcagaatcgcataccgatttatcatcatacactgtttgaaaactaaatggtatacacatcaaaataataaataataacgagtacattctgcaatattgttatcgtaattggaaaaatagtgttcgagtgagttggattatgtgagtattggattgtatattttattttatattttatattttgtagtaagaatagaatgctaatgtcaagtttattccaatagatgtcttattaaaaaacatatataataaataacaatggctgaatggcataaaattatcgaggatatctcaaaaaataataagttcgaggatgccgccatcgttgattacaagactacaaagaatgttctagctgctattcctaacagaacatttgccaagattaatcctctcatcactaatcgtaatattctaaaacctcttattggtcagaaatattgtattgtatatactaactctctaatggatgagaacacgtatgctatggagttgcttactgggtacgcccctgtatctccgatcgttatagcgagaactcataccgcacttatatttttgatgggtaagccaacaacatccagacgtgacgtgtatagaacgtgtagagatcacgctacccgtgtacgtgcaactggtaattaaaataaaaagtaatattcatatgtagtgtcaattttaaatgatgatgatgaaatggataatatccatattgacgatgtcaataatgccggtattggcatacagttcatcgatttttagatttcattcagaggatgtggaattatgttatgggcatttgtattttgataggatctataatgtagtaaatataaaatataatccgcatattccatatagatataattttattaatcgcacgttaaccgtagatgaactagacgataatgtcttttttacacatggttattttttaaaacacaaatatggttcacttaatcctagtttgattgtctcattatcaggaaacttaaaatataatgatatacaatgctcagtaaatgtatcgtgtctcattaaaaatttggcaacgagtacatctactatattaacatctaaacataagacttattctctacatcggtccacgtgtattactataataggatacgattctattatatggtataaagatataaatgacatctatgattttactgcaatatgtatgctaatagcgtctacattgatagtgaccatatacgtgtttaaaaaaataaaaatgaactcttaattatgctatgctattagaaatggataaaatcaaaattacggttgattcaaaaattggtaatgttgttaccatatcgtataacttggaaaagataactattgatgtcacacctaaaaagaaaaaagaaaaggatgtattattagcgcaatcagttgctgtcgaagaggcaaaagatgtcaaggtagaagaaaaaaatattatcgatattgaagatgacgatgatatggatgtagaaagcgcataatacgatctataaaaataagtatataaatactttttatttactgtactcttactgtgtagtggtgataccctactcgattatttttttaaaaaaaaatacttattctgattcttctagccatttccgtgttcgttcgaatgccacatcgacgttaaagataggggagtagttgaaatctagttctgcattgttggtacgcacctcaaatgtagtgttggatatcttcaacgtatagttgttgagtagtgatggttttctaaatagaattctcttcatatcattcttgcacgcgtacatttttagcatccatcttggaatcctagatccttgttctattcccaatggtttcatcaatagaagattaaacatatcgtacgaacacgatggagagtaatcgtagcaaaagtaagcatttcctttaatctcagatcccggatactggatatattttgcagccaacacgtgcatccatgcagcatttcctacatatacccggctatgtaccgcgttatcatcgactgtacgatacataatgttaccgtgttgcttacattgctcgtaaaagactttcatcaatttgtctccttctccgtaaattccagtgggtcttaggcaacaagtatacaattttgctccattcatgattacggaattattggctttcataaccagttgctcggccatacgtttactttttgcgtatacatgtcctggtgatatatcataaagggtatgctcatggccgatgaatggatcaccgtgtttattgggtcctattgcttccatgctactagtatagatcaaatacttgattcctaggtccacacaagctgccaatatagtctgtgttccataatagtttactttcatgatttcattatcggtgtattttccaaatacatccactagagcagctgtatgaataatcagatttaccccatctagcgcttctcttaccttatcaaagtcgtttatatcacattgtatatagtttataaccttaactttcgaggttattggttgtggatcttctacaatatctatgactctgatttcttgaacatcatctgcactaattaacagttttactatatacctgcctagaaatccggcaccaccagtaaccgcgtacacggccattgctgccactcataatatcagactacttattctattttactaaataatggctgtttgtataatagaccacgataatatcagaggagttatttactttgaaccagtccatggaaaagataaagttattggattaaaatccggaacgtatagtttgataattcatcgttacggagatattagtcaaggatgtgattccataggcagtccagaaatatttatcggtaacatctttgtaaacagatatggtgtagcatatgtttatttagatacagatgtaaatatatctacaattattggaaaggcgttatctatttcaaaaaatgatcagagattagcgtgtggagttattggtatttcttacataaatgaaaagataatacattttcttacaattaacgagaatggcgtttgatatatcagttaatgcgtctaaaacaataaatgcattagtttacttttctactcagcaaaataaattagtcatacgtaatgaagttaatgatacacactacactgtcgaatttgatagggacaaagtagttgacacgtttatttcatataatagacataatgactccatagagataagaggggtgcttccagaggaaactaatattggttgcgcggttaatacgccggttagtatgacttacttgtataataagtatagttttaaactgattttagcagaatatataagacacagaaatactatatccggcaatatttattcggcattgatgacactagatgatttggctattaaacagtatggagacattgatctattatttaatgagaaacttaaagtagactccgattcgggactatttgactttgtcaactttgtaaaggatatgatatgttgtgattctagaatagtagtagctctatctagtctagtatctaaacattgggaattgacaaataaaaaatataggtgtatggcattagccgaacatatatctgatagtattccaatatctgagctatctagactacgatacaatctatgtaagtatctacgcgggcacactgagagcatagaggatgaatttgattattttgaagacgatgattcgtctacatgttctgccgtaaccgacagggaaacggatgtataattttttttatagcgtgaaggatatgataaaaaatataattgttgtatttatcccattccaatcaccttatatgattctgtaacacaatgaaggagtcttatagatgtatagaggtcagatactggtttgataaactgtttattccacataagtatgtttgactttatggttagacccgcatactttaacaaatcactgaaaattggagttaggtattgacctctcagaatcagttgccgttctggaacattaaatgtattttttatgatatactccaacgcatttatgtgggcatacaacaagtcattactaatggagtattccaagagaagagatttcaacagactgtttatgaactcgaatgccgcctcattgtcgcttatattgatgatgtcgaattctcccaatatcatcaccgatgagtagctcatcttgttatcgggatccaagttttctaaagatgtcattaaaccctcgatcatgaatggatttatcatcatcgtttttatgttggacatgagcttagtccgtttgtccacatctatagacgacgatttctgaattatttcatatatccctctctttaactccaggaacttgtcaggatggtctactttaatatgttctcgtctaagagatgaaaatctttggatggttgcacgcgacttttctctaaaggatcctctcttaaatgaatccatcttatccttggacaagatggacagtctattttccttagatggtttaatatttttgttacccatgatctataaaggtagacctaatcgtctcggatgaccatatatttattttcagttttattatacgcataaattgtaaaaaatatgttaggtttacaaaaatgtctcgtggggcattaatcgtttttgaaggattggacaaatctggaaaaacaacacaatgtatgaacatcatggaatctataccggcaaacacgataaaatatcttaactttcctcagagatccactgtcactggaaagatgatagatgactatctaactcgtaaaaaaacctataatgatcatatagttaatctattattttgtgcaaatagatgggagtttgcatcttttatacaagaacaactagaacagggaattactttaatagttgatagatacgcattctctggagtagcgtatgccgccgctaaaggcgcgtcaatgactctcagtaagagttatgaatctggattgcctaaacccgacttagttatattcttggaatctggtagcaaagaaattaatagaaacgtcggcgaggaaatttatgaagatgttacattccaacaaaaggtattacaagaatataaaaaaatgattgaagaaggagatattcattggcaaattatttcttctgaattcgaggaagatgtaaagaaggagttgattaagaatatagttatagaggctatacacacggttactggaccagtggggcaactgtggatgtaatagtgaaattacattttttataaatggatgaagcatattactctggcaacttggaatcagtactcggatacgtgtccgatatgcataccgaactcgcatcaatatctcaattagttattgccaagatagaaactatagataatgatatattaaacaaggacattgtaaattttatcatgtgtagatcaaacttggataatccatttatctctttcctagatactgtatatactattatagatcaagagatctatcagaccgaattgattaattcattagacgacaatgaaattatcgattgtatagttaacaagtttatgagcttttataaggataacctagaaaatatagtagatgctatcattactctaaaatatataatgaataatccagattttaaaactacgtatgccgaagtactcggttccagaatagcggatatagatattaaacaagtgatacgtgagaatatactacaattgtctaataatatccgcgaacgatatttgtgaaaatattaaaaaaaaatactttttttattaaatgacgtcgcttcgcgaatttagaaaattatgctgtgatatatatcacgcatcaggatataaagaaaaatctaaattaattagagactttataacagatagggatgataaatatttgatcattaagctattgcttcccggattagacgatagaatttataacatgaacgataaacaaattataaaattatatagtataatatttaaacaatctcaggaagatatgctacaagatttaggatacggatatataggagacactattaggactttcttcaaagagaacacagaaatccgtccacgagataaaagcattttaactttagaagaagtggatagttttttaactacgttatcatccgtaactaaagaatcgcatcaaataaaattattgactgatatcgcatccgtttgtacatgtaatgatttaaaatgtgtagtcatgcttattgataaagatctaaaaattaaagcgggccctcggtacgtacttaacgctattagtcctcatgcctatgatgtgtttagaaaatctaataacttgaaagagataatagaaaatgcatctaaacaaaatctagactctatatctatttctgttatgactccaattaatcccatgttagcggaatcgtgtgattctgtcaataaggcgtttaaaaaatttccatcaggaatgtttgcggaagtcaaatacgatggtgaaagagtacaagttcataaaaataataacgagtttgccttctttagtagaaacatgaaaccagtactctctcataaagtggattatctcaaagaatacataccgaaagcatttaaaaaagctacgtctatcgtattggattctgaaattgttcttgtagacgaacataatgtaccgctcccgtttggaagtttaggtatacacaaaaagaaagaatataaaaactctaacatgtgtttgttcgtgtttgactgtttgtactttgatggattcgatatgacggacattccattgtacgaacgaagatcttttctcaaagatgttatggttgaaatacccaatagaatagtattctcagagttgacgaatattagtaacgagtctcagttaactgacgtattggatgatgcactaacgagaaaattagaaggattggtcttaaaagatattaatggagtatacgaaccgggaaagagaagatggttaaaaataaagcgagactatttgaacgagggttccatggcagattctgccgatttagtagtactaggtgcttactatggtaaaggagcaaagggtggtatcatggcagtctttctaatgggttgttacgacgatgaatccggtaaatggaagacggttaccaagtgttcaggacacgatgataatacgttaagggagttgcaagaccaattaaagatgattaaaattaacaaggatcccaaaaaaattccagagtggttagtagttaataaaatctatattcccgattttgtagtagaggatccaaaacaatctcagatatgggaaatttcaggagcagagtttacatcttccaagtcccataccgcaaatggaatatccattagatttcctagatttactaggataagagaggataaaacgtggaaagaatctactcatctaaacgatttagtaaacttgactaaatcttaatagttacatacaaattaaaataacactatttagttggtggtcgccatggatggtgttattgtatactgtctaaacgcgttagtaaaacatggcgaggaaataaatcatataaaaaatgatttcatgattaaaccatgttgtgaaaaagtcaagaacgttcacattggcggacaatctaaaaacaatacagtgattgcagatttgccatatatggataatgcggtatccgatgtatgcaattcactgtataaaaagaatgtatcaagaatatccagatttgctaatttgataaagatagatgacgatgacaagactcctactggtgtatataattattttaaacctaaagatgccattcctgttattatatccataggaaaggatagagatgtttgtgaactattaatctcatctgataaagcgtgtgcgtgtatagagttaaattcatataaagtagccattcttcccatggatgtttccttttttaccaaaggaaatgcatcattgattattctcctgtttgatttctctatcgatgcggcacctctcttaagaagtgtaaccgataataatgttattatatctagacaccagcgtctacatgacgagcttccgagttccaattggttcaagttttacataagtataaagtccgactattgttctatattatatatggttgttgatggatctgtgatgcatgcaatagctgataatagaacttacgcaaatattagcaaaaatatattagacaatactacaattaacgatgagtgtagatgctgttattttgaaccacagattaggattcttgatagagatgagatgctcaatggatcatcgtgtgatatgaacagacattgtattatgatgaatttacctgatgtaggcgaatttggatctagtatgttggggaaatatgaacctgacatgattaagattgctctttcggtggctggtgagctcggatctaagcttgtcgacataaaaatatagtagaatttcatttgtttttttctatgctataaataggatcgatccgataaagtgaaaaataattctaatttattgcacggtaaggaagtagaatcataaagaaaagcttctgcaggtcgacggatctatggtgagcaagggcgaggagctgttcaccggggtggtgcccatcctggtcgagctggacggcgacgtaaacggccacaagttcagcgtgtccggcgagggcgagggcgatgccacctacggcaagctgaccctgaagttcatctgcaccaccggcaagctgcccgtgccctggcccaccctcgtgaccaccctgacctacggcgtgcagtgcttcagccgctaccccgaccacatgaagcagcacgacttcttcaagtccgccatgcccgaaggctacgtccaggagcgcaccatcttcttcaaggacgacggcaactacaagacccgcgccgaggtgaagttcgagggcgacaccctggtgaaccgcatcgagctgaagggcatcgacttcaaggaggacggcaacatcctggggcacaagctggagtacaactacaacagccacaacgtctatatcatggccgacaagcagaagaacggcatcaaggtgaacttcaagatccgccacaacatcgaggacggcagcgtgcagctcgccgaccactaccagcagaacacccccatcggcgacggccccgtgctgctgcccgacaaccactacctgagcacccagtccgccctgagcaaagaccccaacgagaagcgcgatcacatggtcctgctggagttcgtgaccgccgccgggatcactctcggcatggacgagctgtacaagtaaggatccggaaagttttataggtagttgatagaacaaaatacataattttgtaaaaataaatcactttttatactaatatgacacgattaccaatacttttgttactaatatcattagtatacgctacaccttttcctcagacatctaaaaaaataggtgatgatgcaactttatcatgtaatcgaaataatacaaatgactacgttgttatgagtgcttggtataaggagcccaattccattattcttttagctgctaaaagcgacgtcttgtattttgataattataccaaggataaaatatcttacgactctccatacgatgatctagttacaactatcacaattaaatcattgactgctagagatgccggtacttatgtatgtgcattctttatgacatcgcctacaaatgacactgataaagtagattatgaagaatactccacagagttgattgtaaatacagatagtgaatcgactatagacataatactatctggatctacacattcaccggaaactagttctgagaaacctgattatatagataattctaattgctcgtcggtattcgaaatcgcgactccggaaccaattactgataatgtagaagatcatacagacaccgtcacatacactagtgatagcattaatacagtaagtgcatcatctggagaatccacaacagacgagactccggaaccaattactgataaagaagaagatcatacagttacagacactgtctcatacactacagtaagtacatcatctggaattgtcactactaaatcaaccaccgatgatgcggatctttatgatacgtacaatgataatgatacagtaccatcaactactgtaggcggtagtacaacctctattagcaattataaaaccaaggactttgtagaaatatttggtattaccgcattaattatattgtcggccgtggcaatattctgtattacatattatatatataataaacgttcacgtaaatacaaaacagagaacaaagtctagatttttgacttacataaatgtctgggatagtaaaatctatcatattgagcgggccatctggtttaggaaagacagccatagccaaaagactatgggaatatatttggatttgtggtgtcccataccactagatttcctcgtcctatggaacgagaaggtgtcgattaccattacgttaacagagaggccatctggaagggaatagccgccggaacatactgagtttttaggaaatatttacggaacttctaaaactgctgtgaatacagcggctattaataatcgtatttgtgtgatggatctaaacatcgacggtgttagaagttttaaaaatacttacctaatgccttactcggtgtatataagacctacctctcttaaaatggttgagaccaagcttcgttgtagaaacactgaagcggatgatgagattcatcgtcgtgtgatgttggcaaaaactgacatggatgaggcaggtgaagccggtctattcgacactattatcattgaagatgatgtgaatttagcatatagtaagttaattcagatactacaggaccgtattagaatgtattttaacactaattagagacttaagacttaaaacttgataattaataatataactcgtttttatatgtggctatttcaacgtctaatgtattagttaaatattaaaacttaccacgtaaaacttaaaatttaaaatgatatttcattgacagatagatcacacattatgaactttcaaggacttgtgttaactgacaattgcaaaaatcaatgggtcgttggaccattaataggaaaaggtggatttggtagtatttatactactaatgacaataattatgtagtaaaaatagagcccaaagctaacggatcattatttaccgaacaggcattttatactagagtacttaaaccatccgttatcgaagaatggaaaaaatctcacaatataaagcacgtaggtcttatcacgtgcaaggcatttggtctatacaaatccattaatgtggaatatcgattcttggtaattaatagattaggtgcagatctagatgcggtgatcagagccaataataatagattaccaaaaaggtcggtgatgttgatcggaatcgaaatcttaaataccatacaatttatgcacgagcaaggatattctcacggagatattaaagcgagtaatatagtcttggatcaaatagataagaataaattatatctagtggattacggattggtttctaaattcatgtctaatggcgaacatgttccatttataagaaatccaaataaaatggataacggtactctagaatttacacctatagattcgcataaaggatacgttgtatctagacgtggagatctagaaacacttggatattgtatgattagatggttgggaggtatcttgccatggactaagatatctgaaacaaagaattgtgcattagtaagtgccacaaaacagaaatatgttaacaatactgcgactttgttaatgaccagtttgcaatatgcacctagagaattgctgcaatatattaccatggtaaactctttgacatattttgaggaacccaattacgacaagtttcggcacatattaatgcagggtgtatattattaagtgtggtgtttggttgatgtaaaatttttgtcgataaaaattaaaaaataacttaatttattattgatctcgtgtgtacaaccgaaatcatggcgatgttttacgcacacgctctcggtgggtacgacgagaatcttcatgcctttcctggaatatcatcgactgttgccaatgatgtcagtttataataacaagtatgacattgtaaaagacaaatatatgtggtgttacagtcaggtgaacaagagatatattggagcactgctgcctatgtttgagtgcaatgaatatctacaaattggagatccgatccatgatcaagaaggaaatcacatatcgccacaaaaactactatgctctaagcggaatcgggtacgagagtctagacttgtgtttggaaggagtagggattcatcatcacgtacttgaaacagaaaacgctgtatatggaaaagttcaacatgattattctactatcaaagagaaggccaaagaaatgaatgcactcagttcaggacctatcatcgattaccacgtctggataggagattgtatctgtcaagttactgctgtggacgtacatggaaaggaaattatgagaatgagattcaaaaagggtgcggtgcttccgatcccaaatctggtaaaagttaaacttggggagaatgatacagaaaatctttcttctactatatcggcggcaccatcgaggtaaccacctctctggaagacagtgtgaatcatgtactcatgaaacgtttggaatctatacgccatatgtggtctgttgtatatgatcattttgatattgtgaatggtaaagaatgctgttatgtgcatacgcatttgtctaatcaaaatcttataccgagtactgtaaaaacaaatttgtacatgaagactatgggatcatgcattcaaatgagtatcttagcgaactgaaggaatcaggtggatggagtcccagaccagaaatgcaggaatttgaatatccagatggagtggaagacactgaatcaattgagagattggtagaggagttcttcaatagatcagaacttcaggctggtaaatctattaatgttaaacatacatctgtttcagctaagcaactaagaacacgtatactctcatcttttgccaacacagagggtggatatttgttcattggagttgataataatacacacaaagtatttggattcacggtgggttacgactacctcagactgatagagaatgatatagaaaagcatatcaaaagactttgtgttgtgtatttctgtgagaagaaagaggacatcaagtacacgtgtcgattcatcaaggtatataaacctggggatgaggctacctcgacatacgtgtgcgctatcaaagtggaaagatgctgttgtgctgtgtttgcagattggccagaatcatggtatcaagaagtattctccagatgaataggtgtcacatataaaattttaattaatgtaactatagagaacaaataataggttgtaatatcatatagacaataactaacaattaattagtaactgttatctctttttaactaactaactatacctattaatacatcgtaattatagttcttaacatctattaatcattgattcgcttctttaattttttataaaccaacattgttaattgaaaagggataacatgttacagaatataaattatatatggattttttttaaaaaggaaatacttgactggagtgtatatttatctcttcattatatagcacgcgtgttttccaatttttccacatcccatataatacaggattataatctcgttcgaacatacgagaaagtggataaaacaatagttgattttttatctaggttgccaaatttattccatattttagaatatggggaaaatattctacatatttattctatggatgatgctaatacgaatattataattttttttctagatagagtattaaatattaataagaacgggtcatttatacacaatctcaggttatcatcatccattaatataaaagaatatgtatatcaattagttaataatgatcatccagataataggataagactaatgcttgaaaatggacgtagaacaagacattttttgtcctatatatcagatacagttaatatctatatatgtattttatatagatgccgaagacagttacggttgtacattattacatagatgtatatatcactataagaaatcagaatcagaatcagaatcatacaatgaattaattaagatattgttaaataatggatcagatgtagataaaaaagatacgtacggaaacacaccttttatcctattatgtaaacacgatatcaacaacgtggaattgtttgagatatgtttagagaatgctaatatagactctgtagactttaatagatatacacctcttcattatgtctcatgtcgtaataaatatgattttgtaaagttattaatttctaaaggagcaaatgttaatgcgcgtaataaattcggaactactccattttattgtggaattatacacggtatctcgcttataaaactatatttggaatcagacacagagttagaaatagataatgaacatatagttcgtcatttaataatttttgatgctgttgaatctttagattatctattatccagaggagttattgatattaactatcgtactatttacgacgctgtcagttataatgcgtataatacgttggtctatctattaaacagaaatggtgattttgagacgattactactagtggatgtacatgtatttcggaagcagtcgcaaacaacaacaaaataataatggaagtactattgtctaaacgaccatctttgaaaattatgatacagtctatgatagcaattactaaacataaacagcataatgcagatttattgaaaatgtgtataaaatatactgcgtgtatgaccgattatgatactcttatagatgtacaatcactacagcaatataaatggtatattttaagatgtttcgatgaaatagatatcatgaagagatgttatataaaaaataaaactgtattccaattagttttttgtatcaaagacattaatactttaatgagatacggtaaacatccttctttcgtgaagtgcactagtctcgacgtatacggaagtcgtgtacgtaatatcatagcatctattagatatcgtcagagattaattagtctattatccaagaagctggatcctggagataaatggtcgtgttttcctaacgaaataaaatataacgataacgaactgtccacatatctaaaaatcttataaacactattaaaatataaaatcacactacatcattgtttccttttagtgctcgacagtgtatactatttttaacgctcataaataaaaatgaaaacgatttccgttgttacgttgttatgcgtactacctgctgttgtttattcaacatgtactgtacccactatgaataacgctaaattaacgtctaccgaaacatcgtttaataataaccagaaagttacgtttacatgtgatcagggatatcattcttcggatccaaatgctgtctgcgaaacagataaatggaaatacgaaaatccatgcaaaaaaatgtgcacagtttctgattacatctctgaactatataataaaccgctatacgaagtgaattccaccatgacactaagttgcaacggcgaaacaaaatattttcgttgcgaagaaaaaaatggaaatacttcttggaatgatactgttacgtgtcctaatgcggaatgtcaacctcttcaattagaacacggatcgtgtcaaccagttaaagaaaaatactcatttggggaatatataactatcaactgtgatgttggatatgaggttattggtgcttcgtacataagttgtacagctaattcttggaatgttattccatcatgtcaacaaaaatgtgatataccgtctctatctaatggattaatttccggatctacattttctatcggtggcgttatacatcttagttgtaaaagtggttttatactaacgggatctccatcatccacatgtatcgacggtaaatggaatcccatactcccaacatgtgtacgatctaacgaaaaatttgatccagtggatgatggtcccgacgatgagacagatttgagcaaactctcgaaagacgttgtacaatatgaacaagaaatagaatcgttagaagcaacttatcatataatcatagtggcgttaacaattatgggcgtcatatttttaatctccgttatagtattagtttgttcctgtgacaaaaataatgaccaatataagttccataaattgctaccgtgaatataaatccgttaaaataatgaataattaataattaataatttaataacaaacaagtatcaaaagattaaagacttatagctagaatcaattgagatgtcttcttcagtggatgttgatatctacgatgccgttagagcatttttactcaggcactattataacaagagatttattgtgtatggaagaagtaacgccatattacataatatatacaggctatttacaagatgcgccgttataccgttcgatgatatagtacgtactatgccaaatgaatcacgtgttaaacaatgggtgatggatacacttaatggtataatgatgaatgaacgcgatgtttctgtaagcgttggcaccggaatactattcatggaaatgtttttcgattacaataaaaatagtatcaacaatcaactaatgtatgatataattaatagcgtatctataattctagctaatgagagatatagaagcgcttttaacgacgatggtatatacatccgtagaaatatgattaacaagttgtacggatacgcatctctaactactattggcacgatcgctggaggtgtttgttattatctgttgatgcatctagttagtttgtataaataattatttcaatatactagttaaaattttaagattttaaatgtataaaaaactaataacgtttttatttgtaataggtgcattagcatcctattcgaataatgagtacactccgtttaataaactgagtgtaaaactctatatagatggagtagataatatagaaaattcatatactgatgataataatgaattggtgttaaattttaaagagtacacaatttctattattacagagtcatgcgacgtcggatttgattccatagatatagatgttataaacgactataaaattattgatatgtctactattcaacgcagaggtcacacgtgtagaatatctaccaaattatcatgccattatgataagtacccttatattcacaaatatgatggtgatgagcgacaatattctattactgcagagggaaaatgctataaaggaataaaatatgaaataagtatgatcaacgatgatactctattgagaaaacatactcttaaaattggatctacttatatatttgatcgtcatggacatagtaatacatattattcaaaatatgatttttaaaaatttaaaatatattatcacttcagtgacagtagtcaaataacaaacaacaccatgagatatattataattctcgcagttttgttcattaatagtatacacgctaaaataactagttataagtttgaatccgtcaattttgattccaaaattgaatggactggggatggtctatacaatatatcccttaaaaattatggcatcaagacgtggcaaacaatgtatacaaatgtaccagaaggaacatacgacatatccgcatttccaaagaatgatttcgtatctttctgggttaaatttgaacaaggcgattataaagtggaagagtattgtacgggaccaccgactgtaacattaactgaatacgacgaccatccgtatgctactagaggtagcaaaaagattcctatttacaaacgcggtgacatgtgtgatatctacttgttgtatacggctaacttcacattcggagattctaaagaaccagtaccatatgatatcgatgactacgattgcacgtctacaggttgcagcatagactttgtcacaacagaaaaagtgtgcgtgacagcacagggagccacagaagggtttctcgaaaaaattactccatggagttcgaaagtatgtctgacacctaaaaagagtgtatatacatgcgcaattagatccaaagaagatgttcccaatttcaaggacaaaatggccagagttatcaagagaaaatttaactaaatttctcggtagcacatcaaatgatgttaccacttttcttagcatgcttaacttgactaaatattcataactaatttttattaatgatacaaaaacgaaataaaactgcatattatacactggttaacgcccttataggctctaaccattttcaagatgaggtccctgattatagtccttctgttcccctctatcatctactccatgtctattagacgatgtgagaagactgaagaggaaacatggggattgaaaatagggttgtgtataattgccaaagatttctatcccgaaagaactgattgcagtgttcatctcccaactgcaagtgaaggcaatggattcagggatatacgaaacaccgataaattataaaaaaagcaatgtgtccgctgtttccgttaataatactattttcgtaactggcggattattcataaataactctaatagcacgatcgtggttaacaatatggaaaaacttgacatttataaagacaaacaatggtcgattatagaaatgcctatggctagggtatatcacggcatcgactcgacatttggaatgttatattttgccggaggtctatccgttaccgaacaatatggtaatttagagaaaaacaacgagatatcttgttacaatcctagaacgaataagtggtttgatatttcatatactatttataagatatccatatcatcattgtgtaaactaaataacgtcttctatgtatttagtaaggacattggatatgtggaaaagtatgatggtctccccgctataaaggcattatcaacttctccttattgattgaaaatgaaaatataaatagtttttatgtatagcagtattaccctatagttttattgcttactactaacatggatacagatacagatgttacaaatgtagaagatatcatgaatgaaatagatagagagaaagaagaaatactaaaaaatgtagaaattgaaaataataaaaacattaacaagaatcatcccaatgaatatattagagaagcactcgttattaatacaagtagtaatagtgattccattgataaagaagttatagaatgtatcagtcacgatgtaggaatatagatcatatctactaatttttataatcaatacaaaacataaaaaacaactcgttattacatagcaggcatggaatccttcaagtattgttttgataacgatggcaagaaatggattatcggaaatactttatattctggtaattcaatactctataaggtcagaaaaaatttcactagttcgttctacaattacgtaatgaagatagatcacaaatcacacaagccattgttgtctgaaatacgattctatatatctgtattggatcctttgactatcgacaactggacacgggaacgtggtataaagtatttggctattccagatctgtatggaattggagaaaccgatgattatatgttcttcgttataaagaatttgggaagagtattcgccccaaaggatactgaatcagtcttcgaagcatgcgtcactatgataaacacgttagagtttatacactctcgaggatttacccatggaaaaatagaaccgaggaatatactgattagaaataaacgtctttcactaattgactattctagaactaacaaactatacaagagtggaaactcacatatagattacaacgaggacatgataacttcaggaaatatcaattatatgtgtgtagacaatcatcttggagcaacagtttcaaaacgaggagatttagaaatgttgggatattgcatgatagaatggttcggtggcaaacttccatggaaaaacgaaagtagtataaaagtaataaaacaaaaaaaagaatataaaaaatttatagctactttctttgaggactgttttcctgaaggaaatgaacctctggaattagttagatatatagaattagtatacacgttagattattctcaaactcctaattatgacagactacgtagactgtttatacaagattgaaatattctttttttatagagtgtggtagtgttacggatatctaatattaatattagactatctctatcgcgctacacgaccaatatcgattactatggatatcttctatgaaaggagagaatgtattcatttctccagcgtcaatctcgtcagtattgacaatactgtattatggagctaatggatccactgctgaacagctatcaaaatatgtagaaaaggaggagaacacggataaggttagcgctcagaatatctcattcaaatccatgaataaagtatatgggcgatattctgccgtgtttaaagattcctttttgagaaaaattggcgataagtttcaaactgttgacttcactgattgtcgcactatagatgcaatcaacaagtgtgtagatatctttactgaggggaaaatcaatccactattggatgaacaattgtctcctagcaattagtgccgtatactttaaagcaaaatggttgacgccattcgaaaaggaatttaccagtgattatcccttttacgtatcaccaacggaaatggtagacgtaagtatgatgtctatgtacggcgagctatttaatcacgcatctgtaaaagaatcattcggtaacttttcaatcatagaactgccatatgttggagatactagtatgatggtcattcttccagacaagattgatggattagaatccatagaacaaaatctaacagatacaaattttaagaaatggtgtaactctctggaagctacgtttatcgatgttcacattcccaagtttaaggtaacaggctcgtataatctggtggatactctagtaaagtcaggactgacagaggtgttcggttcaactggagattatagcaatatgtgtaatttagatgtgagtgtcgacgctatgatccacaaaacgtatatagatgtcaatgaagagtatacagaagcagctgcagcaacttgtgcactggtgtcagactgtgcatcaacaattacaaatgagttctgtgtagatcatccgttcatctatgtgattaggcatgttgatggaaaaatttttttcgttggtagatattgctctccgacaactaattgttaaccattttttttaaaaaaatagaaaaaacatgtggtattagtgcaggtcgttattcttccaattgcaattggtaagatgacggccaactttagtacccacgtcttttcaccacagcactgtggatgtgacagactgaccagtattgatgacgtcaaacaatgtttgactgaatatatttattggtcgtcctatgcataccgcaacaggcaatgcgctggacaattgtattccacactcctctcttttagagatgatgcggaattagtgttcatcgacattcgcgagctggtaaaaaatatgccgtgggatgatgtcaaagattgtgtagaaatcatccgttgttatataccggatgagcaaaaaaccatcatcggactttgtgcatatgctgctacttactggggaggtgaagaccatcccactagtaacagtctgaacgcattgtttgtgatgcttgagatgctaaattacgtggattataacatcatattccggcgtatgaattgatgagttgtacatcttgacattttcttctttcttctcttctccctttcccagaaacaaactttttttacccactataaaataaaatgagtatactacctgttatatttctttctatatttttttattcttcattcgttcagacttttaacgcgcctgaatgtatcgacaaagggcaatattttgcatcattcatggagttagaaaacgagccagtaatcttaccatgtcctcaaataaatacgctatcatccggatataatatattagatattttatgggaaaaacgaggagcggataatgatagaattataccgatagataatggtagcaatatgctaattctgaacccgacacaatcagactctggtatttatatatgcattaccacgaacgaaacctactgtgacatgatgtcgttaaatttgacaatcgtgtctgtctcagaatcaaatatagatcttatctcgtatccacaaatagtaaatgagagatctactggcgaaatggtatgtcccaatattaatgcatttattgctagtaacgtaaacgcagatattatatggagcgggcatcgacgccttagaaataagagacttaaacaacggacacctggaattattaccatagaagatgttagaaaaaatgatgctggttattatacatgtgttttagaatatatatacggtggcaaaacatataacgtaaccagaattgtaaaattagaggtacgggataaaataataccttctactatgcaattaccagaaggtgttgtaacttcaataggtagtaatttgactattgcgtgtagagtatcgttgagacctcccacaacggatgcagacgtcttttggataagtaatggtatgtattacgaagaagatgatggggacggagacggtagaataagtgtagcaaataaaatctatatgaccgataagagacgtgttattacatcccggttaaacattaatcctgtcaaggaagaagatgctacaacgtttacgtgtatggcgtttactattcctagcatcagcaaaacagttactgttagtataacgtgaatgtatgttgttacatttccatgtcaattgagtttataagaatttttatacattatcttccaacaaacaattgacgaacgtattgctatgattaactcccacgatactatgcatattattaatcattaacttgcagactatacctagtgctattttgacatactcatgttcttgtgtaattgcggtatctatattattaaagtacgtaaatctagctatagttttattatttaattttagataatataccgtctccttatttttaaaaattgccacatcctttattaaatcatgaatgggaatttctatgtcatcgttaatatattgtgaacaacaagagcagatatctataggaaagggtggaatgcgatacattgatctatgtagttttaaaacacacgcgaactttgaagaatttatataaatcattccatcgatacatccttctatgttgacatgtatatatccaggaattcttttattaatgtcaggaaatgtataaactaaaacattgcccgaaagcggtgcctctatctgcgttatatccgttcttaacttacaaaatgtaaccaatacctttgcatgacttgttttgttcggcaacgttagtttaaacttgacgaatggattaattacaatagcatgatccgcgcatctattaagtttttttactttaacgcccttgtatgtttttacagagactttatctaaatttctagtgcttgtatgtgttataaatataacgggatatagaactgaatcacctaccttagatacccaattacattttatcagatccagataataaacaaattttgtcgccctaactaattctatattgttatatattttacaattggttatgatatcatgtaataacttggagtctaacgcgcatcgtcgtacgtttatacaattgtgatttagtgtagtatatctacacatgtatttttccgcactatagtattctggactagtgataaaactatcgttatatctgtcttcaatgaactcatcgagatattgctctctgtcatattcatacacctgcataaactttctagacatcttacaatccgtgttattttaggatcatatttacatatttacgggtatatcaaagatgttagattagttaatgggaatcgtctataataatgaatattaaacaattatatgaggacttttaccacaaagcatcataaaaatgagtcgtcgtctgatttatgttttaaatatcaaccgcgaatcaactcataaaatacaagagaatgaaatatatacatattttagtcattgcaatatagaccatacttctacagaacttgattttgtagttaaaaactatgatctaaacagacgacaacctgtaactgggtatactgcactacactgctatttgtataataattactttacaaacgatgtactgaagatattattaaatcatggagtggatgtaacgatgaaaaccagtagcggacgtatgcctgtttatatattgcttactagatgttgtaatatttcacatgatgtagtgatagatatgatagacaaagataaaaaccacttatcgcatagagactattccaacctactactagagtatataaaatctcgttacatgttattgaaggaagaggatatcgatgagaacatagtatccactttattagataagggaatcgatcctaactttaaacaagacggatatacagcgttacattattattatttgtgtctcgcacacgtttataaaccaggtgagtgtagaaaaccgataacgataaaaaaggccaagcgaattatttctttgtttatacaacatggagctaatctaaacgcgttagataattgtggtaatacaccattccatttgtatcttagtattgaaatgtgtaataatattcatatgactaaaatgctgttgacttttaatccgaatttcaaaatatgtaataatcatggattaacgcctatactatgttatataacttccgactacatacaacacgatattcttgttatgttaatacatcactatgaaacaaatgttggagaaatgccgatagatgagcgtcgtataatcgtattcgagtttatcaaaacatattctacacgtccggcagattcgataacttatttgatgaataggtttaaaaatatagatatttatacccgctatgaaggaaagacattattacacgtagcatgtgaatataataatacacacgtaatagattatcttatacgtatcaacggagatataaatgcgttaaccgacaataacaaacacgctacacaactcattatagataacaaagaaaattccccatataccattaattgtttactgtatatacttagatatattgtagataagaatgtgataagatcgttggtggatcaacttccatctctacctatcttcgatataaaatcatttgagaaattcatatcctactgtatacttttagatgacacattttacaatagacacgttaggaatcgcaattctaaaacgtatcgatacgcattttcaaaatacatgtcgtttgataaatacgatggtataataactaaatgtcataaagaaacaatattgctcaaactatccactgttctagacactacactatatgcagttttaagatgccataattcgaaaaagttaagaagatacctcaacgagttaaaaaaatataataacgataagtcctttaaaatatattctaatattatgaatgagagataccttaatgtatattataaagatatgtacgtgtcaaaggtatatgataaactatttcctgttttcacagataaaaattgtctactaacattactaccttcagaaattatatacgaaatattatacatgctgacaattaacgatctttataatatatcgtatccacctaccaaagtatagttgtatttttctcatgcgatgtgtgtaaaaaaactgatattatataaatattttagtgccgtataatgaagatgacgatgaaaatgatggtacatatatatttcgtatcattattgttattgctattccacagttacgccatagacatcgaaaatgaaatcacagaattcttcaataaaatgagagatactctaccagctaaagactctaaatggttgaatccagcatgtatgttcggaggcacaatgaatgatatagccgctctaggagagccattcagcgcaaagtgtcctcctattgaagacagtcttttatcgcacagatataaagactatgtggttaaatgggagaggctagaaaaaaaatagacggcgacaggtttctaataaacgtgttaaacatggtgatttatggatagccaactatacatctaaattcagtaaccgtaggtatttgtgtaccgtaactacaaagaatggtgactgtgttcagggtatagttagatctcatattaaaaaacctccttcatgcattccaaaaacatatgaactaggtactcatgataagtatggcatagacttatactgtggaattctttacgcaaaacattataataatataacttggtataaagataataaggaaattaatatcgacgatattaagtattcacaaacgggaaagaaattaattattcataatccagagttagaagatagtggaagatacaactgttacgttcattacgacgacgttagaatcaagatgtaaaatacttacggttataccgtcgcaagaccacaggtttaaactaatactagatccaaaaatcaacgtaacgataggagaacctgccaatataacatgcactgctgtgtcaacgtcattattgattgacgatgtactgattgaatgggaaaatccatccggatggcttataggattcgattttgatgtatactctgttttaactagtagaggcggtatcaccgaggcgaccttgtactttgaaaatgttactgaagaatatataggtaatacatataaatgtcgtggacacaactattattttgaaaaaacccttacaactacagtagtattggagtaaatacacaatgcatttttatatacattactgaataattattattattatttatatcgtatttgtgctataacgcgactatctaggtatttgtatctcaccgatagagaacatataaatgtagactctattaaacagttgtgtaaaatatcagatcctaatagatgtggatgtacggctttagaaatgagttcattaaaatatgtgatatcaacggaacatatttatataattatactattgctgttagtataattattgattccacggaagaactaccaacagttactccaattacaacaacatataattatactatcgatgatagcactactgaagaactacaagtgactcctcatatggatctccatcgatgatacatgtattaaaatactttccgaataagtcttttaaatattgtattaattatgaaaaactatgctatgcgagtatgatacgatactagattttatctctagcgagagatgtcgttagaatcatttatcaacgaatatcgataacatgtgtcatttatacgttaaagtctgtccgtcttctctattgtttagactgtttgtagaatgctgtgatataaacaaactagtagacacaaatatttaactcatgatgaagttgagaatgatatgctttagctaatataaaaatatattaatccactatatattctagacttgatttaaaaccgataaactactactacgtactgtataagttaggagcagaccctaattatgtagatgatagaggtaatacttctgcatctatatgtccacttatgagaaaacgtcatttaataagatgcatcgtgaaaagaaatttattaaagagttggtaaaatatgaaaccgaaagtaaataatataggaaatacacctctacataactacgtatctcaatatgatatcactctcattcctcatccacaacccattaaaaaatggaaattaaagccctctattagcataaacggctacaggtctacctttacaatggcctttccttgtgcccagttcagaccctgtcattgccacgctactaaggactccctgaataccgtggccgacgtcagacattgtctgactgaatacatcctgtgggtttctcatagatggacccatagagaaagcgcagggtctctctacaggcttctcatctctttcagaactgatgcaacggagctctttggtggtgagttgaaggattcacttccgtggagatcattaaatgactccatgaaaaccgccgaagaacttcgtgcaatcattggactttgtactcaatcagctatcgtctctggaagagtcttcaacgataagtatatcgacatactacttatgctgcgaaagattctgaacgagaacgactatctcaccctcttggatcatatccgcactgctaaatactaaatctccttcatgctctctcactacactttttatcatcttatgaggaataattagcaccagaatagctatggattgcacatgtattctatgtcgtctactggatgaagatgtgacgtacaaaaaaataaaactagaaattgaaacgtgtcacaacttatcaaaacatatagatagacgaggaaacaatgcgctacattgttacgtctccaataaatgcgatacagacattaagattgttcgactgttactctctcgcggagtcgagagactttgtagaaacaacgaaggattaactccgctaggagcatacagtaagcatagatacgtaaaatctcagattgtgcatctactgatatccagctattcgaattcctctaacgaactcaagtcgaatataaatgatttcgacttacgtctgctaaaatacctaattgtggataaacggatacgtccgtccaagaatacgaattatgcaatcaatggtctcggattggtggatatatacgtaacgacgcctaatccgagaccagaagtattgctatggcttcttaaatcagaatgttacagcaccggttacgtatttcgtacctgtatgtacaacagtgatatgtgtaagaactctcttcattactatatatcgtctcatagagaatctctatccaaggatgtaattaaatgtttgatcgataacaatgtttccatccaatactactggtcttgctcaaccatagatatagagattattaataaaggatgtggacacgtgtagagtatacgacgtcagccctatattagaggcgtattatctaaacaagcgatttagagtaaccccatataatgtagacatggaaatcgttaatcttcttattgagagacgtcatactcttgtcgacgtaatgcgtagtattacttcgtacgattccagagaatataaccactacatcatcgataacattctaaagagatttagacaacaggatgaatccatcgtacaagccatactgataaactacttacattacggcgatatggtaagtatacctatcattcaatgcatgttggataagacgacggacaacaactttgttaataataatctcgtcgatgtaaacgtcgtaaggtttatcgtggaaaatatggacacgcggctgtaaatcacatatctaacaatggccgtctatgtatgtacggtctgatattatcgagatttaataattgcgggtatcactgttatgaagatgtatttgatatactaagcaagtacatggatgatatagatatgatcgataactctactatattacgcggtcgatgtcaataatatacaatttgcaaagcggttattggaatatggagcgagtgtcacgctcgataatcaatacggccatccagaaaagcagttaccaaagagaagctagttgatttattactgagttaccatcccactctagagactatgattgacgcatttaatagagatatacgctatctatatcctgaaccattattcgcctgtatcagatacgccttaatcctagatgatgattttccttctaaagtaagtatgatatcgccggtcgtcataaggaactaaagcgctatagagcagacattaatagaatgaagaatgcctacatatcaggcgtctccatgtttgatatattatttaaacgaagcaaacgccacagattgagatacgcaaagaacaatgagaggatcgactccattaaataatttatcatggagtgataatgtcctgtttccatggcatattacaaaatcgattccgtccaagatgataaaaacatttaccggcatcataaacacggagtttattttatatgtctcgcataaacattactaaaaaaatatattgttcggttttctttcacatctttaattatgaaaaagtaaatcattatgagatggacgcatcgttcgcgacagtatgtggtacatacctaacgtatttatggacgacggtaagaatgaaggtcacgtttctgtcaacaatgtcgacgcgatcgtgtaacacgactcacaatagaatctgtgaatgctctcccgatcatggatgcaaggcatgtgtttcccaaacaaaatgtggaataggatacggagtatccggagacgtcatctgttctccgtgtggtctcggaacatattctcacaccgtctcttccgcagataaatgcgaacccgtacccagaaatacctttaactatatcgatgtggaaattaacctgtatccagttaacgacacatcgtgtactcggacgaccactaccggtctcagcgaatccatctcaacgtcggaactaactattactatgaatcataaagactgcgatcccgtcttcttaataaggtagcgacttcaggtttctttacaggagaaaggtgtgcactctgaatttcgagattaaatgcaataacaaagattcttcctccaaacagttaacgaaagcaaagaatgatactatcatgccgcattcggagacagtaactctagcgtcgacatctatatactatatagtaataccaatactcaagactacgaaactgatacaatctcttatcatgtgggtaatgtagccatatgcccggtagttgcgatatacataaactgatcactaattccaaacccacccgctttttatagtaagtttttcacccataaatacaataattaatttctcgtaaaagtagaaaatatattctaatttattgcacggtaaggaagtagaatcataaagaacagtactcaatcaatagcaatcatgaaacaatatatcgtactggcatgcatgtgcctgccagtcttcagcaatcatcctcatcgtgtacggaagaagaaaacaaacatcatatgggaatcgatgttattatcaaagtcacaaagcaagaccaaacaccgaccgatgataagatttgccaatccgtaacggaaattacagagtccgagtcagatccagatcccgaggtggaatcagtcgaggatgtagatcctcctaccacttattactccatcatcggtggaggtctgagaatgaactttggattcaccaaatgtcctcagattaaatccatctcagaatccgctgatggaaagactgtgaggtgtctatcgacatcagatgtagcgaagaagagaaagacagcgacatcaagacccatccagtactcgggtctaacatctctcataagaaagtgagttacgaagatatcatcggttcaacgatcgtcgatacaaaatgtgtcaagaatctagagtttagcgttcgtatcggagacatgtgcaaggaatcatctgaacttgaggtcaagtatgtcgacggatcggcatctgaaggtgcaaccgatgatacttcactcatcgattcaacaaaactcaaagcgtgtgtctgaatcgataactctattcatctgaaattggatgagtagggttaatcgaacgattcaggcacaccacgaattaaaaaagtgtaccggacactatattccggtttgcaaaacaaaaagttacctctcgcgacttcttctttttctgtctcaatagtgtgatacgattatgacactattcctatttcctttcagggtatcacaaaaatattaaacctctttctgatggtctcatacaaaaatatttttattctctttctctctttgatggtctcataaaaaatatttttattctctttctctctttgatggtctcataaaatatttttattctctttctctctttgatggtctcataaaaaatatttttattctctttctctctttgatggtctcataaaa

SEQ ID NO: 8 - DNA, 187589 bp, synthetic construct
  source 1..187589: mol_type = other DNA
agataaaatagaaactggagaaatcaaaacattttcatccgtgtgttttaagattagttctttaaagatatccatggtatagaccaaacaataacgataacgatatatatcataaataaataatgttaaatttcagtttatgtttgtaccccgtattcatacttaacaaattggtattacataccattaataatgcaagcataaaaaatcgttagtagatgtttctaaatataggttccgtaagcaaagaatataagaatgaagggtaatgataaaatcaatcgttatctaaaatgatcatactcatttattttattctattatattaacacatacatttttaacagcaacacattcaatattgtattgttatttttatattatttacacaattaacaatatattattagtttatattactgaattaataatataaaattcccaatcttgttataaacacacactgagaaacagcataaacacagaatccatcaaaaatgttgataaattatctgatgttgttgttcgctgctatgataatcagatcattcgccgatagtggtaacgctatcgaaacgacattgccagaaattacaaacgctacaacagatattccagctatcagattatgcggtccagagggagatggatattgtttacacggtgactgtatccacgctagagatatcgacggtatgtattgtagatgctctcatggttatacaggcattagatgtcagcatgtagtattagtagactatcaacgttcagaaaaaccaaacactacaacgtcatatatcccatctcccggtattgtgcttgtattagtaggcattattatgtgttgtctattatctgtttataggttcactcgacgaactaaactacctatacaagatatggttgtgccataatttttataaattttttttatgagtatttttacaaaaatgtataaagtgtatgtcttatgtatatttataaaaatgctaaatatgcgatgtatctatgttatttgtatttatctaaacaatacctctacctctagatattatacaaaaattttttatttcagcatattaaagtaaaatctagttaccttgaaaatgaatacagtgggtggttccgtatcaccagtaagaacataatagtcgaatacagtatccgattgagattttgcatacaatactagtctagaaagaaatttgtaatcatcttctgtgacgggagtccatatatctgtatcatcgtctagtttatcagtgtcccatgctatatttctgttatcatcattagttaatgaaaataactctcgtgcttcagaaaagtcaaatattgtatccatacatacatctccaaaactatcgcttatacgtttatctttaacgatacctatacctagatggttatttactaacagacattttccagatctattgactataactcctatagtttccacatcaaccaagtaatgatcatctattgttatataacaataacataactcttttccgtttttatcagtatgtatatctatattaacgtcgtcgttgtagtgaatagtagttattgatctattatatgaaacggatatgtctagaacagcaattgtcttacgtccagttaacactttcgttgatttaaagtctagagtctttgcaaacataatatccttatccgactttatatttcctgtagggtggtataattttattttgcctccacatatcggtgtttccaaatatattactagacaatattccatatagttattagttaagggtacccaattagaacacgtacgcttattatcatcatttggatcgtatttcataaaagttattgtactatcgatgtcaacacattctacattttttaatcgtctatatagtatttttctgatattttctataatatcagaattgtcttccatcggaagttgtatactatcggaatcagttacatgtttaaataattctctgatgtcattccttatacaatcaaattcattattaaacagtttaatagtctgtagacctttatcgtcgtaaatatccattgtcttattagttacgcttatttttatgtgttttacgttgctttattatattttataagaatgattgtttgacgaatcacgagaactattaagacacattattaggtatatattataaaaaagtttttgattacgatgttataagaggaaagaggacacattaacatcatacatcaattaactacattcttataacatcgtaatcaaaagaattgcaattttgatgtataacaactgtcaatgggttatggaattgtatattacatattatacggtatgttggtaacgacaaataccgatcggtaattgtctgccggtgtaatagaattatatatatctatctattacaccggccttgtatacataataataagttgtggtagtatgatctccatatttataatttaggactttgtattcagtatttttggaatcataaaaaataaaaaaaagttttactaatttaaaatttaaaaagtatttacatttttttcactgtttagtcgcggatatggaattcgatcctgccaaaatcaatacatcatctatagatcatgtaacaatattacaatacatagatgaaccaaatgatataagactaacagtatgcattatccgaaatattaataacattacatattatatcaatatcacaaaaataaatacacatttggctaatcaatttcgggcttggaaaaaacgtatcgccggaagggactatatgactaacttatctagagatacaggaatacaacaatcaaaacttactgaaactatacgtaactgtcaaaaaaatagaaacatatatggtctatatatacactacaatttagttattaatgtggttattgattggataaccgatgtgattgttcaatcaatattaagagggttggtaaattggtacatagctaataatacctatactccaaatacacccaataatacaacaaccatttctgagttggatatcatcaaaatactggataaatacgaggacgtgtatagagtaagtaaagaaaaagaatgtggaatttgctatgaagttgtttactcaaaacgattagaaaacgatagatactttggtttattggattcgtgtactcatatattttgcataacatgcatcaatatatggcataaaacacgaagagaaaccggtgcgtcggataattgtcctatatgtcgtacccgttttagaaacataacaatgagcaagttctataagctagttaactaataaataaaaagtttaatttgttgacgacgtatgtcgttattttttctcgtataaaagattaatttgattctaatataatctttagtattggataaatatcaattcaaattaattccattagattatatcataaataaaaatagtagcacgcactacttcagccaaatattcttttttgaaacgccatctatcgtagtgaggacacaagtgaacctataatgagcaaatttattagtatcggttacatgaaggactttacgtagagtggtgattccactatctgtggtacgaacggtttcatcttctttgatgccatcacccagatgttctataaacttggtatcctcgtccgatttcatatcctttgccaaccaatacatatagctaaactcaggcatatgttccacacatcctgaacaatgaaattctccagaagatgttacaatgtctagatttggacatttggtttcaaccgcgttaacatatgagtgaacacacccatacatgaaagcgatgagaaataggattttcatcttgccaaaatatcactagaaaaaatttatttatcaattttaaaggtataaaaaatacttattgttgctcgaatattttgtatttgatggtatacggaagattagaaatgtaggtattatcatcaactgattctatggttttatgtattctatcatgtttcactattgcgttggaaataatatcatatgcttccacatatattttattttgttttaactcataatactcacgtaattctggattattggcatatctgtgaataattttagctccatgatcagtaaatattaatgagaacatagtattaccacctaccattatttttttcatttcgttcaattcttgattgcaaagatctatataatcattatagcgttgacttatggactctggaatcttagacgatgtacaggcatctataatcatggcatatttaatacattgttttatagcatagtcgttatctacgatgttagatatttctctcaatgaatcaatcacacaatctaatgtaggtttatgacataatagcattttcagcagttcaatgtttctagattcgttgatggcaatggctatacatgtatatccgttatttgatctaatgttgacatctgaaccggattctagcagtaaagatactagagattgtttattatatctaacagccttgtgaagaagtgtttctcctcgtttgtcaatcatgttaatgtctttaagataaggtaggcaaatgtttatagtactaagaattgggcaagcataagacatgtcacaaagaccctttttgtatgtataagtgtagaaattataacatccatagttggatttacataggtgtccaatcgggatctctccatcatcgagataattgatggcatctcccttccttttttagtagatatttcatcgtgtaagaatcaatattaatatttctaaagtatccgtgtatagcctctttatttaccacagctccatattccaacatgcattccactaaagggatatcgatatcgccgaatgtcatatactcaattagtatatgttggaggacatccgagttcattgttttcaatatcaaagagatggtttccttatcatttctccatagtggtacaatactacacattatttcgtgcggctttccattctccaaaaacaatttgaccaaatctacatctttattgtatctataatcactatttagataatcagccataattcctcgagtgcaacatgttagatcgtctatatatgaataagcagtgttatctattcctttcattaacaatttaacgatgtctatatctatatgagatgacttaatataatattgaagagctgtacaatagtttttatctatagaagacggcttgattccgtgattaattagacatttaacaacttccggacgcacatatgctctcgtatccgactttgaatacagatgcaatacggtaccgcaatttcgtagttgataatcatcatacgcgtatcagtactcgtcctcataaagaacactgcagccattttctatgaacaaatcaataattttaggaacaggatcattgtcattacataattttctataactgaacgatggttttcacatttaacactcaagtcaaatccatgttctaccaacacctttatcaagtcaacgtctacatttttggatttcatatagctgaatatattaaagtcatttatgttgctaaatccagtggcttctagtagagccatcgctatatcctttaactttaacatgtctactatttgtgtattcttctaatggggtagctgtctccaatttttgcgtaatggattagtgccactgtctagtagtagtttgacgacctcaacattattacaatgctcattaaaaaggtatgcgtgtaaagcattattcttgaattggttcctggtatcattaggatctctgtctctcaacatctgtttaagttcatcgagagccacctcctcattttccaaatagtcaaacattttgactgaatgagctactgtgaactctatacacccacacaactaatgtcattaaatatcatgtcaaaaacttgtacaattattaataaaaataatttagtgtttaaattttaccagttccagattttacacctccgttaaccccactggacgatcctcctccccacattccaccgccaccagatgtataagttttagatcctttattactaccatcatgtccatggataaagacactccacatgccgccactactaccccctttagaagacatattaataagacttaagagttaagacaagtttaacaataaaattaatcacgagtaccctactaccaacctacactattatatgattatagtttctatttttacagtaccttaactaaagtctctagtcacaagagcaatactaccaacctacactattatatgattatagtttctatttttataggaacgcgtacgagaaaatcaaatgtctaatttctaacggtagtgttgataaacgattatcgtcaatggatacctcctctatcatgtcgtctattttcttactttgttctattaacttattagcattatatattatttgattataaaacttatattgcttattagcccaatctgtaaatatcggattattaacatatcgtttctttgtaggtttatttaacttgtacatcactgtaagcatgtccgtaccatttattttaatttgacgcatatccgcaatttctttttcgcagtcggttataaattctatatatgatggatacatgctacatgtgtacttataatcgactaatatgaagtacttgatacatattttcagtaacgatttattattaccacctatgaataagtacctgtgatcgtctaggtaatcaactgttttcttaatacattcgatggttggtaatttactcagaataatttccaatatcttaatatataattctgctatttctggaatatatttatctgccagtataacacaaatagtaatacatgtaaacccatattttgttattatattaatgtctgtgccattatctattaaccattctactaggctgacactatgcgacttaatacaatgataaagtatactacatccatgtttatctattttgtttatatcatcaatatacggcttacaaagttttagtatcgataacacatccaactcacgcatagagaaggtagggaataatggcataatatttattaggttatcatcattgtcattatctacaactaagtttccattttttaaaatatactcgacaactttaggatctctattgccaaatttttgaaaatatttatttatatgcttaaatctatataatgtagctccttcatcaatcatacatttaataacattgatgtatactgtatgataagatacatattctaacaatagatcttgtatagaatctgtatatcttttaagaattgtggatattaggatattattacgtaaactattacacaattctaaaatataaaacgtatcacggtcgaataatagttgatcaactatataattatcgattttgtgatttttcttcctaaactgtttacgtaaatagttagatagaatattcattagttcatgaccactatagttactatcgaataacgcgtcaaatatttcccgtttaatatcgcatttgtcaagataataatagagtgtggtatgttcacgataagtataataacgcatctctttttcgtgtgaaattaaatagtttatcacgtccaaagatgtagcataaccatcttgtgacctagtaataatataataatagagaactgttttacccattctatcatcataatcagtggtgtagtcgtaatcgtaatcgtctaattcatcatcccaattataatattcaccagcacgtctaatctgttctattttgatcttgtatccatactgtatgttgctacatgtaggtattcctttatccaataatagtttaaacacatctacattgggatttgatgttgtagcgtatttctctacaatattaataccatttttgatactatttatttctatacctttcgaaattagtaatttcaataagtctatatcgatgttatcagaacatagatattcgaatatatcaaaatcattgatatttttatagtcgactgacgacaataacaaaatcacaacatcgtttttgatattattatttttcttggtaacgtatgcctttaatggagtttcaccatcatactcatataatggatttgcaccactttctatcaatgattgtgcactgctggcatcgatgttaaatgttttacaactatcatagagtatcttatcgttaaccatgattggttgttgatgctatcgcattttttggtttctttcatttcagttatgtatggatttagcacgtttgggaagcatgagctcatatgatttcagtactgtagtgtcagtactattagtttcgatcagatcaatgtctagatctatagaatcaaaacacgataggtcagaagataatgaatatctgtacgcttctttttgtactgtaacttctcgttttgttagatgtttgcatcgtgctttaacatcaatggtacaaattttatcctcgctttgtgtatcatattcgtccctactataaaattgtatattcagattatcatgcgatgtgtatacgctaacggtatcaataaacggagcacaccatttagtcataacagtaatccaaaattttttaaagtatatcttaacgaaagaagttgtgtcattgttaggatttggtaaatcattgtctacggtgtatggtactagatcctcataagtgtatatatctagagtaatgtttaatttatcaaatggttgataatatggatcctcatgacaatttccgaagatggaaatgagatatagacacgcaataaatctaattgcggacatggttactccttaaaaaaatacgaataatcaccttggctatttagtaagtgtcatttaacactatactcatattaatccatggactcataatctctatacgggattaacggatgttctatatacggggatgagtagttctcttctttaactttatactttttactaatcatatttagactgatgtatgggtaatagtgtttgaagagctcgttctcatcatcagaataaatcaatatctctgtttttttgttatacagatgtattacagcctcatatattacgtaatagaacgtgtcatctaccttattaactttcaccgcatagttgtttgcaaatacggttaatcctttgacctcgtcgatttccgaccaatctgggcgtataatgaatctaaactttaatttcttgtaatcattcgaaataatttttagtttgcatccgtagttatcccctttatgtaactgtaaatttctcaacgcgatatctccattaataatgatgtcgaattcgtgctgtatacccatactgaatggatgaacgaataccgacggcgttaatagtaatttactttttcatctttacatattgggtactagttttactatcataagtttataaattccacaagctactatggaataagccaaccatcttagtataccacacatgtcttaaagtttattaattaattacatgttgttttatatatcgctacgaatttaaacagagaaatcagtttaggaaaaaaaattatctatctacatcatcacgtctctgtattctacgatagagtgctactttaagatgcgacatatccgtgtcatcaaaaatatactccattaaaatgattattccggcagcgaacttgatattggatatatcacaacctttgttaatatctacgacaatagacagcagtcccatggttccataaacagtgagtttatctttctttgaagagatattttgtagagatcttataaaactgtcgaatgacatcgcatttatatctttagctaaatcgtatatgttaccatcgtaatatctaaccgcgtctatcttaaacgtttccatcgctttaaagacgtttccgatagatggtctcatttcatcagtcatactgagccaacaaatataatcgtgtataacatctttgatagaatcagactctaaagaaaacgaatcggctttattatacgcattcatgataaacttaatgaaaaatgtttttcgttggatgaatagtatgtcttaataattgttattatttcattaattaatatttagtaacgagtacactctataaaaacgagaatgacataactaatcataactagttatcaaagtgtctaggacgcgtaattttcatatggtatagatcctgtaagcattgtctgtattctggagctattttctttatcgcattagtaagttcagaatatgttataaatttaaatcgaataacgaacatgactttagtaaagtcgtctatattaactcttttattttctagccatcgtaataccatgtttaagatagtatattctctagttactacgatctcatcgttgtctagaatatcacatactgaatctacatccaattttagaaattggtctgtgttacatatctcttctatattattgttgatgtattgtcgtagaaaactattacgtagaccattttctttataaaacgaatatatagtactccaattatctttaccgatatatttgcacacataatccattctctcaatcactacatctttaagattttcgttgttaagatatttggctaaactatataattctattagatcatcaacagaatcagtatatatttttctagatccaaagacgaactctttggcgtcctctataatattcccagaaaagatattttcgtgttttagtttatcgagatctgatctgttcatatacgccatgattgtacggtacgttatgataaccgcataaaataaaaatccattttcatttttaaccaatactattcataattgagattgatgtaatactttgttactttgaacgtaaagacagtacacggatccgtatctccaacaagcacgtagtaatcaaatttggtgttgttaaacttcgcaatattcatcaatttagatagaaacttatactcatcatctgttttaggaatccatgtattattaccactttccattatcccaggctatgtttcgtccatcatcattgcgtagagtaaataattcttttgtattcggtagttcaaatatataatccatgcatagatcggtaaagctattgtagatgtgatttttcctaaatctaatataaaactcgtttactagcaaacactttcctgatttatcgaccaagacacatatggtttctaaatctatcaagtggtggggatccatagttatgacgcagtaacatatattattacattcttgactgtcgctaatatctatatatttattgttatcgtattggattctgcatatagaacacataaccaatttatagtcgcgctttacattctcaaatctacagttaagagatttagaaaacattatatcctcggatgatgttatcactgtttctggagtaggatatattaaagtctttacagatttcgtccgattcaaataaattactaaataatatcccacattatcatctgttagagtagtatcattaaatctattatattttatgaaaaatatatcacttgctcacctctatatttcgtacatttttaaactgtttatataatatctctctgatatatttattgtgtcggtagatgataccgttacatttgaattaatggtgttccattttacaacttttaacaagttgaccaattcatttttaatagtatcaaacgctccatgattaaatattttaatagtatccattttatatcactacggacacaaagtagctgacataaaccattgtataatttttatgttttatgtttattagcgtacacattttggaagttccggctgccatgtatttcctggagagcaagtagatgatgaggaaccagatagtttatatccgtacttgcacttaaagtctacattgtcgttgtatgagtatgatcttttaaacccgctagacaagtatccgtttgatattgtaggatgtggacatttaacaatctgacacgtgggtggatcggaccattctcctcctgaacacaggacaccagagttaccaatcaacgaatatccactattgcaactataagttacaacgctcccatcggtataaaaatcctcgtatccgttatgtcttccgttggatatagatggaggggattggcatttaacagattcacaaataggtgcctcgggattccataccatagatccagtagatcctaattcacaatacgatttagattcaccgatcaaatgatatccgctattacaagagtacgttatactagagccaaagtctactccaccaatatcaagttggccattatcgatatctcgaggcgatgggcatctccgtttaatacattgattaaagagtgtccatccagtacctgtacatttagcatatataggtcccattttttgctttctgtatccaggtagacatagatattctatagtgtctcctatgttgtaattagcattagcatcagtctccacactattcttaaatttcatattaatgggtcgtgacggaatagtacagcatgatagaacgcatcctattcccaacaatgtcaggaacgtcacgctctccaccttcatatttatttatccgtaaaaatgttatcctggacatcgtacaaataataaaaaagcccatatatgtttgctattgtagaaattgtttttcacagttgctcaaaaacgatggcagtgacttatgagtttcatctttagtaaacatatcataatattcgatattacgagttgacatatcgaacaaattccaagtatttgattttggataatattcgtattttgcatctgctataattaagatataatcaccgcaagaacacacgaacatctttcctacatggttaaagtacatgtataattctatccatttgtcttccttaactatatatttgtatagataattacgagtctcataagtaattccagtaattgcatagatgtcaccatcgtactctacagcataaactatactatgatgtctaggcatgggagacttttttatccaacgatttttagtgaaacattctacatcgtttaatactacatatttttcatacgtggtataaactccacccattacatatatatcatcgtttacgaataccgacgcgcctgaatatctaggagtaattaagtttggaagtcttatccatttcgaagtgccgtgtttcaaatattctgccacacccgttgaaatagaaaattctaatcctcctattacatataactttccatcgttaacacaagtactaacttctgattttaacgacgacatattagtaaccgttttccattttttcgtttcaagatctacccgcgatacggaataaacatgtctattgttaatcatgccgccaataatgtatagacaattatgtaaaacatttgcattatagaattgtctatctgtattaccgactatcgtccaatattctgttctaggagagtaatgggttattgtggatatataatcagagtttttaatgactactatattatgttttataccattttgtgtcactggctttgtagatttggatatagttaatcccaacaatgatatagcattgcgcatagtattagtcataaacttgggatgtaaaatgttgatgatatctacatcgtttggatttttatgtatccactttaataatatcatagctgtaacatcctcatgatttacgttaacgtcttcgtgggataagatagttgtcagttcatcctttgataattttccaaattctggatcggatgtcactgcagtaatattgttgattatttctaacatcgacgcattatatagttttttaattccatattgtttagaaaagttaaacatccttatacaatttgtggaattaatattatgaatcatagtttttacacatatatctactacaggcgtaacatcaattattacggcagcaactagtatcatttctacattgtttatggtgatgtttatcttcttccagcgcatatagtctaatagcgattcaaacgcgtgatagtttataccattcaatataatcacttcatcatttatatggtgctcctgaatgcgtttaaaaaaattatacggagacgccgtaataatttccttattcacttgtataatttccccattgatagaaaatatcacgctttccattcttgaagtactataagtaattatagtataatgtaaacgtttatatattcaatatttttataaaaatcattttgacattaattcctttttaaatttccgtctatcatctatagaaacatgttctatgaatttataaaatgcttttacgtgtcctatcgtaggcgatagaaccgctaaaaagcctatcgaatttctacaaaagaatctgttatatggtatagggagagtataaaacattaaatgtccgtacttattaaagtattcagtagccaatcctaactctttcgaatacttattaatggctcttattctgtacgaatctatttttttgaacaacggacctagtggtatatcttgttctatgtatctaaaataatgtcttacgagatccgttagtttaatatccgcagtcatcttgtctagaatggcaaatctaactgcgggtttaggctttagtttagtttctatatctacatctatgtctttatccaacactaaaaatataatagctaatattttattacaatcatccggatattcttctacgatctcactaactaatgtttctttggttatactagtatagtcacgatcagacaaataaagaaaatcagatgatcgatgaataatacatttaaattcatcatctgtaagatttttgagatgtctcattaaaatattattagggtcagtactcattatcatatattggcagcagctattacttattttatttttctgtattttattatttttcaccatatagatcaatcattagatcatcaaaatacttttcaatcatcctaaagagtatggcgaacgaatcttcccatctaatttctgaacgttcaccaatgtctctagccactttggcactaatagcgatcattcgcttagcatcttctatattattaactggttgattcaatctatctagcaatggaccgtcagacagtgtcattctcatgttcttaatcaatgcacatacatcgccgtcatctaccaattcatccaacgacataagatttttaaaatcatcattataataggatggatcgccatcatttctccaaagaatatatctaataagtagagtcctcatgtttagtaatttaactattttagttaataactattttttatgttaaatcaagtagcaccactatgttaatacttattcatattttagtttttaggattgataatcaacataaaaattaatacatcatcaattttggaaatactttgtttccacgtagtcaatgaaacatttgagctcatcgtataggacgttctcgaataggacgtaattatatactggtttatatttgttcaagatagatacaaatccgataacttttttgacgaagtctacgggatccactttaaaagtgtcataccgggttctttttattcttttaaacagatcaatggtgtgatgttgattaggtcttttacgaatttgatacagaatagcgtttacgtatccaccatagtgatcaatcgccatttgttcgtatgtcataaattctttaattatatgacatgttgtattatttagttcatccttgttcatcgttaggaatctatccaaaatggcaattatactagaactataactgcgtcgttgtatacacatatcgatgtgtctgtttatacaatcaatgatattaggatccatgctactaccttcgggtaaaaatgtagcatcatatacctctagtacgttaggttcatcgttacccattgtagaggacgtcataatcgaattctaaaaaaatatattatttttatgttattttgttaaaaataatcatcgaatacttcgtaagatactccttcatgaacataatcagttacaaaacgtttatatgaagtaaagtatctacgatttttacaaaagtcaggatgcataagtacaaagtacgcgataaacggaataataatagatttatctagtctatctttttctatagctttcatagttagatacatggtctcagaagtcggattatgtaacatcagcttcgataaaatgattgggttatttattcttacacattcgctcatacatgtatgaccgttaactacagagtctacactaaaatgattgaacaatagatagtctaccattgcttcgtattcagatagtacagcgtagtacatggcatcttcacaaattatatcattgtctaatagatatttgacgcatcttatggatcccacttcaacagccatcttaaaatcagtagaatcatattgttttcctttatcattaataatttctagaacatcgtctctatcataaaagatacaaatattaactatttgatccgtaataacattgctagtagatagcaatttattaataagttgcgctggggtcaatgtcttaacaagaagggtaagaggactatctccgaatttgttttgtttattaacatccgttgatggaagtaaaagatttatgatgtctacattcttgactggtttagagcatacaatatggagaggtgtatttccatcatgatctggttttgagggactaattcctagtttcatcatccatgagattgtagaagcttttggattgtctgacataagatgtctatgaatatgatttttgccaaatttatccactatcctggcttcgaatccgatggacattatttttttaaacactctttctgaaggatctgtacacgccaacaacggaccacatccttcttcatcaaccgagttgttaatcttggctccataccgcaccaataaatttattctctctatgacttcatcatctgttcccgagagataatatagaggtgttttatgctgtttatcacatgcgttcggatctgcaccgtgtgccaacagcgtcgcaactattctattattgttaattttagaagctatatgtaatggataatttccatcatcgtccgtctcatttggcgagtatcctatatgaagaagttcttcaacaaatcgttcatctagtcctttaattccacaatacgcatgtagaatgtgataatgtccagaaggttcgattgcttgcagcatattcctaaatacatctaaatttttactattatacttggcataaagagatagataatactctgctgacataatgttgtctattgtagtataaaaattaatatttctatttctatttctatttctatatatttgcgacaatttactctctataacaaatatcataacttacttcttttatgtcaagaaagcactggtttagttcatccataaatgtcacgccataactaccgcgcataccatactcagaattacgataaagatatttatccttggggtgtaggtaatggggattaatctttgttggatcagtctctaagttaacacacgtcacacaggatccatttatagttatatcacatgatgatttatgatgaattgattccggaagatcactatcgtattttgtggttccacaattcatttccatacatgttattgtcacactaatattatgatgaactttatctagccgctgagtggtaaacaacagaacagatagtttattatctttaccaactccctcagccgccgctacaaatctctgatccgtatccatgatggtcatgtttatttctagtccgtatccagtcaacactatgttagcatttctgtctatatagctttcactcatatgacactcacccataatagtagaattaatgtcataatttacaccaatagtgagttcggcggcaaagtaccaataccggtaatcttgtcgaggaggacatatagtgttcttgtattcggcagaatacccgagagatacgacacaaaggagtaagactaatttgtaaaccatcttacacaatagtacgatgcaattagcaataagacaatggaaatctatctataacatataattattctatcaattttaccaattagttagtatagtgtttaacaaaaatgttggagaatctaattagtttttccgcgcataattgacgtacatgagtctgagttccttgtttttactaattatttcatccaatttattattcttgacaatatcgaggtcttttgtataggagtcagacttgtattcaacatgcttttctataatcatcttagctatttcggcatcatccaatagtacattttccagattaacagaatagatattaatgtcgtatttgaacagagcctgtagcatttcaaggtctttgttatctatagccaatttgatgtccggaatgaagagaagggaattgttagtgttggtagattccatatagtcaagcaagagaatcatcatatccacgtttccattttttatggagtcgtgaatgcaactgtatagaatagccaggtcaaaagtagatggtatctctgaaagaaagtatgatacaatacttacatcattaagcatgacggcatgataaaatgaagttttccatccagttttcccatagaacatcagtctccaatttttcttaacaaacagttttaccgtttgcatgttgccactatcaaccgcgtaatacaatgcggtgtttcctttgtcatcaaattgtgaatcatccattccactgaatagcaaaatctttgctattttggtatcttctaatgtggctgcctgatgtaatggaaattcattctctagaagatttttcaatgctccagcgttcaacaacgtacatactagacgcacgttattatcggctattgcataatacaaggcactatgtccatggacatccgccttaaatgcatctttgctagagagaaagcttttcagctgcttggacttccaagtattaattcgtgacagatccatgtctgaaacgagacgctaattagtgtataatttttcattttttataattttgtcatactgctccagaattaataatatctctaatagatctgattagtagatatatggctatcgcaaaacaacatatacacatttaataaaaataatattcattaaggagattcagattccaccgtacccatcaatataaataaaataatgattccttacaccgtacccataatattaataattatccttccaccgtaccaatcaatataaataaaataatgattccttacaccgtacccataaacaatattaaggagattccaccttacccataaacaatataaatccagtaatatcatgtctaatgatgaacacaaatggtgtattaaattccagttgttcaggagatgatctagccgtagctaccatgatagtagatgcctctgctacagttccttgttcgtcgacgtctatctttgcattctgaaacattttatagatatataatgggttcctagtcatatgtttaaacgacgccttatctggattaaacatactaggagccatcatttcggctatcgacttaatatccctcttattttcgatagaaaatctagggagtttaagattgtacactttattccctaattgagatgaccaatagtctaattttgcagccgtgatagaatctgtgaaatgagtcatattatcacctattgccaggtacatactaatattagcatccttatacggaaggcgcaccatatcatattcttcatcgtcgacggtgattgtatttccttgcaatttagtaactacgttcatcatgggaaccgttttcgtaccgtacttattagtaaaactagcattgcgtgttttagtgatatcaaacggatattgccacgtacctttaaaatatatagtattaatgattgcccatagagtattattgtcgagcatagtagaatctactacattagacataccggatctacgttctactatagaattaattttattaaccgcatctcgtctaaagtttaatctatataggccgaatctatgatattgttgataataagacggtttaatacatacagtactatcgacgaaactttgataagttagatcagtgtacgtatatttagatgttttcagcttagctaatcccgatattaattctgtaaatgctggacccagatctctttttctcaaatccatagtcttcaataattctactctagtattacctgatgcaggcaatagcgacataaacatagaaaacgaatagccaaacggcgagaagacaatattatcatcctcgtccccatcctgaatatttttatacgctaatataccggcattggtaaatccttgcagacgatatgcggacgccgtacacgctaacgatagtatcaataacgcaatcatgattttatggtattaataatttaccttatttttatgtttagtataaaaaattattgatgtctgcacatccttttgtaattgacatctatatatccttttgtataatcaactctaatcactttaacttttacttttttccctacaagtttatccctatatttaaaatatctatccatatgcatctgaacactctctgccaagatagctgcagagtgaggatagtcaaaaagatcaatatatagagcataatcattctcgtatactctgccctttattacatcgcccgcattgggcaacgaataacaaaatgcgagcatctcgttaacgggctcgtaaattgggataaaaattatgtttttattgttttatatctattttattccagatagtattcaggaatttctttttccggttgtatctcgtcgttgtatatatcatttgtgcattgtttcatattttttaatagtctacatcttttagtaggactagtatcgtacaattcatagctgtattttgaattccaatcacgcataaaaatatcttccaattgttgacgaagacctaatccatcatccggtgtaatattaatagatgctccacatgtatccgtaaagtaattccctgtccaatttgaggttcctatatacgccgttttatctgttaccatatatttggcatggtttaccctagaatatggaattggaggatcggcatccggtacaataaacagttttacttctatatctatgtttttagattttagcatagcgatagatcttaaaaagtttctcataataaacgaagatcgttgccagcaactaatcaatagcttaactgacacttgtctgtctatagcggctcttcttaattcatcttctatatacggccaaaacaaaattttacccgccttcgaataaataatagggataaagttcataacggatacataaacgaatttactcgcatttccgatacatgacaataaagcggttaaatcattagttctttccatagtacatagttgttgtggcgcagaagcaataaatacagaatgtggaacaccgcttacgttcatactaagaggatgatctgtattataatacgcaggataaaagtttttccaattatatggtagattgttaactccaagataccagtatacctcaaaaatttgagtgagatccgctgccaagttactattattgaagatagcaatacccaattccttgacctgagttagtgatctccaatccatgttagcgcttcctaaataaatatgtgtattatcggatatccaaaattttgtatgaagaactcctcctaggatatttgtaatatctatgtatcttacttcaactccggccatttgtagcgtttcaacatcctttaatggtttgttggatttattgacggctactctaacgcgtactcctcttttgggtaattgtataatctcatttaatattatcgtgccgaaattcgtacccacttcatccgataaactccaataaaaagatgatatatctagtgtttttgtggtattggatagaatttccctccacacgttaaatgtagacaaatatactttatcaaattgcatacctataggaatagtctctgtaatcactgcgattgttttatccggattcattttatttgttaaaaaaaataatatcacttcactctattaaaaatccaagtttctatttctttcataactgattttttaacttcgtccgtttccttatgaagatgatgtttggcaccttcataaatttttatttctctattacaatttgcatgttgcatgaaataatatgcacctgaaacatcactaatctcattgtttgttccctggagtatgagactaggggtgttaatcttgggaattatttttctaaccttgttggtagccttcaagacctgactagcaaatccagccttaattttttcatgattgaccaatggatcgtattggtatttataaacttcatccatatctctagatactgattctgggcatagctttccgactggtgcatttggtgtgaagcttcccataagtttggcagctagcatatttagtcttggaacagcttctgtattaactagaggagacattagaatcattgctgtaaataagtctggattctcataagcggccagtatagaaattgttgctcccatggaatgacccaataagaagactggaactcctggataagtagatttaatagtcaccacgtgctgtaccacatctctaacatacgtaccaaagtcatctatcatcattttttcaccattacttcttccatgaccaatatgatcatgtgagaatactaaaattcctaacgatgatatattttcagctagttcatcataacgtccagaatgttcaccagctccatgacttatgaatactaatgccttaggatatgtaataggtttccaatatttacaatatatgtaatcattgtccagattgaacatacagtttgcactcatgattcacgttatataactatcaatattaacagttcgtttgatgatcatattatttttatgttttattgataattgtaaaaacatacaattaaatcaatatagaggaaggagacggatactgtcttttgtgagatagtcatggcgactaaatcagattatgaggatgccgttttttactttgtggatgatgatgaactatgtagtcgtgactccatcatcgatctaatagatgaatatatcacgtggagaaatcatgttatagtgtttaacaaagatatcaccagttgtggaagactgtacaaggaattgatgaagttcgatgatgtcgctatacggtactatggaattgataaaattaatgagattgtcgagactatgagcgaaggagaccactacatcaatctcacagaagtccatgatcaggaaagtctattcgctaccataggaatatgtgctaaaatcactgaacattggggatacaaaaagatttcagaatctagattccaatcattgggaaacattacagatctgatgaccgacgataatataaacatcttgatactttttctagaaaaaaaattgaattgatgacatagtgttataacgcgtaattattatgttaatgcattcttattctatatccggtgttaaaaaaaattatcctatcatgtatttgagagtcttatatgtagcaaacatgatagctgtgatgccaataagctttagatattcacgcgtgctagtgttggggatggtattatctggcggtgaaatgtccgttatataatctacaaaacaatcatcgcatatagtatgcgatagtagagtaaacatttttatagtttctactggattcatacatcgtctacccaattcggttatgaatgaaattgtcgccaatcttacacccaaacccttgttatctattagtatagtattaacttcgttatttatgtcataaactgtaaatgattctgtagatgccatatcatacatgatattcatgtccctattataatcattattaactttatcacaatacatgttgataatatctatatatgatctagtttttgttggcaactgtctatacaagtcgtctaaacgttgtttactcatatagtattgaacagccatcattacatggtcccgttccgttgatagataatcgagtatgttagtggacttgtcaaatctatataccatattttctggaagtggatatacatagttgtgatcatcattatcgctagcctcatcttctatatccggtactataccattatctatatccggtactataccattatctatatccggtactataccattatctataccatcatctacatcatcatctacataatctactatattattatacataaacatcgacaacatactattgtccattatctaagtccagttgatccaaacccttgagctcctctatctgtactatctagagattgtacttcctccagttctggataatatatacgttgatagattagctgagctattctatctcccgtatttacattgaacgtacattttccattattaataagaatgactcctatgtttcccctataatcttcgtctattacaccacctcctatatcaatgccttttagtgacagtccagacctaggagctattctaccatagcagaacttaggcatggacatactaatatctgtcttaattaactgtctttctcctggagggatagtataatcgtaagcgctatacaaatcatatccggcagcacccggcgattgcctagtaggagatttagctctgttagtttccttaacaaatctaactcgtgagttaatattcatgttgctcataaaactaatattttatttcaaaattatttaccatcccatatattccatgaataagtgcgattattatacacttctatagtatctatatacgaaccacgataaaatcctcctatcaatagcagtttattatccactatgatcaattctggattatccctcggataaataggatcatctatcagattccatgtattgctgtattcgcaataaaattcagcatttctaccaaccaagaataaccttctaccgaacactaacgcgcatgatttataatgaggataataagtggatggtccaaactgccactgatcatgatcgggtagcaaatattctgtagttgtatccgtttcagaatgtcctcctattacgtatataacattgtttatagatgcgattgctggattacatctaggtttaagaagactcggcatattaacccaagaagtatccccatggaaccaacgctcgacagatgtgggatttggtagacctcctactacgtataatttattgttagcaggtaccccactagcgtacagtctgggactattcatcggaggaattggaatccaattgtttgatacacaatttaacgctatagcatggttatgtatttcattgttcatccatccaccgatgagatatactacttctccaacatgagtacttgtacacatatggaatatatctataatttgatccatattcataggatactctatgaatggatacctgtatgatttgcgtggtcgtttatcacaatgaaatattttggtacagtctagtatccattttacattatttatacctctgggtgaaagataatttgacctgattacatttttgataaggagtagcaaatttcctaatctatttcttcgcttcatataccacttaatgacaaaatcaactacataatcctcatctggaacatttagttcgtcgctttctagaataagtttcatagatagataatcaaaattgtctatgatgtcatcttccagttccaaaaagtgtttggcaataaagtctttagtatgacataagagattggatagtccgtattctatacccatcatgtaacactcgacacaatattcctttctaaaatctcgtaggataaagtttatacaagtgtagatgataaattctacagatgttaatatagaagcacgtaataaattgacgacgttatgactatctatatatacctttccagtatatgagtaaataactatagaagttagactgtgaatgtcaaggtctagacaaaccctcgtaactggatctttatttttcgtgtatttttgacgtaaatgtgtgcgaaagtaaggagataactttttcaatatcgtagaattgactattatattgcctcctatagcctcaataattgttttgaatttcttagtcatagacaatgctaatatattcttacagtacacagtatttacaaatattggcatttatgtttctttaaaagtcaacatctagagaaaaatgattatcttcttgagacataactcccattttttggtattcacccacacgtttttcgaaaaaattagtttttccttccaatgatatattttccatgaaatcaaacggattggtaacattataaatttttttaaatcccaattcagaaatcaatctatccgcgacaaattctatatatgttttcatcatttcacaattcattcctataagtttaactggaagagccgcagtaagaaattcttgttcaatggataccgcatctgttataatagatctaacggtttcttcactcggtggatgcaataaatgtttaaacatcaaacatgcgaaatcgcagtgcagaccctcgtctctactaattagttcgttggaaaacgtgagtccgggcattaggccacgctttttaagccaaaatatggacgcaaatgacccagaaaagaagattccttctactgcggcaaaggcaacaagtctctctccataactggcgctgtcatgtatccacttttgagcccaatcggccttcttttttacacaaggcatcgtttctatggcattaaagagatagtttttttcattactatctttaacataagtatcgatcaaaagactatacatttccgaatgaatgttttcaatggccatctgaaatccgtagaaacatctagcctcggtaatctgcacttctgtacaaaatcgttcagctaaattttcattcactattccgtcactggctgcaaaaaacgccaatacatgttttataaaatgtttttcgttgggtgttagtttattccaatcattgatatctttagatatatctacttcttccactgtccaaaatgatgcctctgcctttttatacatattccagatgtcatgatattggattgggaaaataacaaatctatttggatttggtgcaaggatcggttccataactaaattaacaatagtagtaaattttttttcagttatcatctatatgactgtatttggatcttttatacattgccattgcagctatcactacaataattacaagtattattgatagcattgttattagtactatcataattaaattatctacatccatgggtgctgaataatcgttattatcatcattttgtaattgtgacatcatactagataaatcatttgcgagattgttgttggaaactgacatggaggatgcgttagcattatcgttattattatttaacgcctcccattctgattcacaaatgttacgtgcgttcaacattttatggaaactataattttgtgaaaacaggtaacaagaaaactcttcatcgttcaaatttttaacaatagtaaaccgattaaacgtcgagctaatttctaacgctagcgactctgttggatatggatttccagatatatatcttttcagctcccctacgtatctataatcatctgtaggaaatggaatgtatttccatctatctagtgttcctaatatcatatatggtggtgtagtagaaccattaagtgtgaaagattttatttcgcatcgtattttaacttcgcaataagattttgttagataacgcacactaccattcaaatcaatgatattagcctttacagatatattcatagtagtcgtgactatgactccatcttttagatgcgatactcccttgtatgtaccagaatcttcgtacctcaaactcgatatatttaaacaagttaatgagatattgacgcgttttatgaatgacgatatatatccagaagtttcatcctctgtggctagcgctataaccttatcattataataccaaagagtatgattaatatgtgatacgtcagtgtgggtacaaatatgtacattatcgtctacgtcgtattcgatacatccgcatacacccaacagatataaaatgataaatactctaacaacgttcgtacccatattgatgcggcttaatacatgttttgatttcaatttattgtaaaaaaagaatcggttttatacggttcgatattcttattctcgtctatcatctccacacagtcaaatccgtggttagcatgcacctcatcaaccggtaatagactatcggactcttctatcattataactcgagaatatttaatttgctcattattaatcaagtcaattatcttatttttaacaaatctgagtattttactcattttttataaaaacttttagaaatatacagactctatcgtgtgtctatatcttctttttatatccaatgtatttatgtctgatttttcttcatttatcatatataatggtccaaattctacacgtgcttcgaattcatccagatcattaatgttcttataatcgtaatatccttctcctcccgcttctacatcttccttcttattcttattcttattcttgtcacagaatctaccacaacaggatcccatgacgagcgtcatattaaactaattcattttcaattataatatactgattagtaatgaccattaaataaaaatattcttcataaccggtaagaaagtgaaaagttcacattgaaactatgtcagtcagtagttatacatcatgaaatgatgatatatatattctctattttggcggaggattatatgatataattcgtggataatcattcttaagacacatttcttcattcgtaaatcttttcacgttaaatgagtgtccatattttgcaatttcttcatatgatggcggtgtacgtggacgatgctgctcctgttcttgttgtggtcgccgactgtcgtgtttgcgtttagatccctccattatcgcgattgcgtagatggagtactatttttataccttgtaattaaatttttttattaattaaacgtataaaaacgttccgtatctgtatttaagagccagatttcgtctaatagaacaaatagctacggtaaaaataactagaataatcgctacacccactagaaaccacggatcgtaatacggcaatcggttttcgataataggtggaatgtatattttatttaaggacttaacaattgtctgtaaaccacaatttgcttccgcggatcctgtattaactatctgtaaaagcatatgttggccgggcggagccgaacattctccgatatccaatttctgtatatctataatgttattaacctccgcatacgcattacagttcttttctagcttggataccgcactaggtaaatcatttaggtctattcctatttcctcagcgatagctcttctatccttttccggaagcaatgaaatcacttcaataaatgattcaaccatgagtgtgaaactaagtcgagaattactcatgcatttgttagttattcggagcgcgcaatttttaaactgtcctataacctctcctatatgaatagcacaagtgacattagtagggatagaatgttgagctaatttttgtaaataactatctataaaaagattatacaaagttttaaactctttagtttccgccatttatccagtctgagaaaatgtctctcataataaatttttccaagaaactaattgggtgaagaatggaaacctttaatctatatttatcacagtctgttttggtacacatgatgaattcttccaatgctgtactaaattctatatctttttcgatttctggatatgtttttaataaagtatgaacaaagaaatggaaatcgtaataccagttatgttcaactttgaaattgttttttattttcttgttaatgattccagccacttgggaaaagtcaaagtcgtttaatgcagatttaatacgttcattaaaaacaaactttttatcctttagatgaattattattggttcattggaatcaaaaagtaagatattatcgggtttaagatcagcgtgtaaaaagttgtcgcaacagggtagctcgtaaactttaatgtataacagagacatctgtaaaaagataaactttatatattgtaccaaagatttaaatcctaatttgatagctaactcggtatctactttatctgccgaatacagtgctaagggaaaaattataatgtttcctctttcgtattcgtagttagttctcttttcatgttcgaaaaagtgaaacatgcggttaaaatagtttataacattaatattactgttaataactgccgggtaaaaatgggatagtaatttcacgaatttgatactgtcctttctctcgttaaacgcctttagaaaaactttagaagaatatctcaatgatagttcctggccatccatagtttgtatcaataataacaacatatgaagaacccgtttatacagagtatgtaaaaatgttaatttatagtttaatcccatggcccacgcacacacgattaattttttttcgtctccctttagattattgtacagaaatttgggtactgtgaactccgcagtagtttccatgggactatataattttgtggcctcgaatacaaattttactacatagttatctatcttaaagactataccatatcctcctgtagatatgtgataaaaatcgtcgtttataggataaaatcgtttatccttctgttggaaaaaggatgaattaatgtaatcattctcttctatctttagtagtgtttccctattaaaattcttaaaataatttaacaatctaactgatggagcccaattttggtgtaaatctaattgggacattatattgttaaaatacaaacagtctcctaatataacagtatctgataatctatggggagacatccattgatattcaggggatgaatcattggcaacacccatttattgtacaaaaagccccaatttacaaacgaaagtccaggtttgatagagacaaacaattaactattttgtctctgtttttaacacctccacagtttttaatttctttggtaatgaaattattcactatatcagtatcttctttatctaccagagattttactaacttgataaccttggctgtctcattcaatagggtagtgatatttgtatgtgtgatattgatatctttttgaattgtttcttttagaagtgattctttgatagtgtcagcatacgaattacaataatgcagaaactcagttaacatgcaggaattatagtaagccaattccaattgttgcctgtattgtattagagtgtcaatatgtgcaatggtgtccttgcgtttctctgatagaatgcgagcagcgattttggcgttatcatttgacgatatttctggaatgatgaatcctgtttctactaactttttagtaggacaaagcgaaacaatcaagaagatagcttctcctcctatttgtggaagaaattgaactcctctagatgatctactgacgatagtatctccttgacagatattggaccgaattacagaagtacctggaatgtaaattcctgaaacgccctcattttttaaacagattgttgcagtaaatcccgcactgtgaccaagatagagagctcctttggtgaatccatctctatgtttcagtttaaccaaaaaacagtcagctggtctaaaatttccatctctatctaatacagcatccaacttgatgtcgggaaccataaccggtttaatgttatatgtaacattgagtaaatccttaagttcataatcatcactgtcatcagttatgtacgagccaaacaatgtttctaccggcatagtggatacgaagatgctatccatcagaatgtttccctgattagtgttttctatatagctattcttctttaaacgattttccaaatcagtaactatgttcatttttttaggagtaggacgcctagccagtatggaagaggattttctagatcctctcttcaacatctttgatctcaatggaatgcaaaaccccatggtgtaacaaccaacgataaaaataatattgtttttcactttttataattttaccatctgactcatggattcattaatatctttatacgagctactaatgtacaattctttataactgaactgagatatatacatttgatctatggtttccatgattgagtaaatgaatgctctgcaataactaatggcaaatgtatagaacaacgaaattatactagagttgttaaagttaatattttctatgagctgttccaataaattatttgttgtggctgcgttcaagtcataaatcatcttgatactatccagtaaacagtctttaagttctggaatattatcatcccattgtaaagcccctaattcgactatcgaatatcctgctctgatagcagtttcaatatcgacggacgtcaatactgtaataaaggtggtagtattgtcatcatcgtgataaactacgggaatatggtcgttagtaggtacggtgactttacacaacgcgatatataactttccttttgtaccatttttaacgtagttgggacgtcctgcaggatattgttttgaagaaatgatatcgagaacagatttgatacgatatttgttggattcctgattattcactataatataatctagacagatagatgattcgataaatagagaagatatatcgttggtaggataatacatccccattccagtattctcggatactctattgatgacactagttaagaacatgtcttctattctagaaaatgaaaacatcctacacggactcattaaaacttctagcgctcctgattgtgtctcgaatgcctcaaacaaggatttcaaggatgccatagattctttgaccaatgatttaatattgcgtttagcatctgatttttttattaaatcgaatggtcggctctctgatttactaccccaatgataacaatagtcttgtaaagataagccgcaagaaaatttatacgcatccatccaaataactctagcaccatctgatgatattagtgtattattatagattttccatccacagttattgggccagtatactgttagcaacggtatatcaaatagattactcatgtaacctactagaatgatagttcgtgtactagtcataatatctttaatccaatctaagaaatctaaaattagatcttttacactgttaaagttaacaaaggtattacccgggtacgtggatatcatatatggtattggtccattatcagtaatagctccataaactgatacggcgatggtttttatatgtgtttgatctaacgaggaagaaattcgcgcccacaattcatctctagatatgtatttaatatcgaacggtaacacatcaatctcgggacgcgtatatgtttctaaattcttaatccaaatataatgatgacctatatgccctattatcatactgtcaactatagtatacctagagaacttacgatacatctgtttcctgtaatcgttaaattttacaaatctataacatgctaaaccttttgacgacagccattcattaatttctgatatggaatctgtattctcgataccgtatcgttctaaagccagtgctatatctccctgttcgtgggaacgctttcgtataatatcgatcaatggataatctgaagtttttggagaataatatgactcatgatctatttcgtccataaacaatctacacataggaattggaggcgatgatcttaattttgtgcaatgagtcaatcctataacttctaatcgtgtaatattcatcatcgacataacactatctatgttatcatcgtatattagtataccacgaccttcttcatttcgtgccaaaatgatatacagtcttaaataattacgcaatatctcaatagtttcataattgttagctgttttcatcaaggtttgtatcctgtttaacatgatggcgttctataacgtctctattttctatttttaattttttaaatttttaacgatttactgtggctagatacccaatctctctcaaatatttttttagcctcgcttacaagctgtttatctatactattaaaactgacgaatccgtgattttggtaatgggttccgtcgaaatttgccgaagtgatatgaacatattcgtcgtcgactatcaacaattttgtattattctgaatagtgaaaaccttcacagatagatcattttgaacacacaacgcgtctagacttttggcggttgccatagaatatacgtcgttcttatcccaattaccaactagaagtctgatcttaactcctctattaatggctgcttctataatggagttgtaaatgtcgggccaatagtagctattaccgtctacacgtgtagtgggaactatggccaaatgttcaatatctatactagtcttagccgacttgagtttatcaataactacatcagtgtctagatctctagaatatcccaataggtgttctggagaatcagtaaagaacactccacctataggattcttaatatgatacgcagtgctaactggcagacaacaagccgcagagcataaattcaaccatgaattttttgcgctattaaaggctttaaaagtatcaaatcttctacgaagatctgtggccagcgggggataatcagaatatacacctaacgttttaatcgtatgaatagatcctccagtaaatgacgcatttcctacataacatctttcatcatctgacacccaaaaacaaccgagtagtagccccacattattttttttatctatgttaacagttataaaatttatatccgggcaataactttgtagctctcccagatttcttttccctcgttcatctagcaaaactattattttaacccctttttcagatgcctcttttagtttatcaaaaataagagctcccctagtagtactcataggattacaacaaaaagatgctatgtatatatatttcttggctagagtgataatttcgttaaaacattcaaatgtagtcaaatgatcggatctaaaatccatattttctggtagtgtttctaccagcctacattttgctcccgcaggtactgatgcaaatggccacatttagttaacataaaaacttatacatcctgttctatcaacgattctagaatatcatcggctatatcgctaaaattttcatcaaagtcaacatcacaacctaactcagttaatatattaagaagttccatgatttcatcttcgtctatttccatatccatatccattgtagattgttgactgattatcgagtttaaatcagtattaatacccaattcttcagaatacactcggtgtttcatcgtaaccctctatcagtaacgtatttaagttggtagattttcaattatgtatcaatatagcaacagcagttcttgctcctccttgattctagtatcctcttcattattttcttctacgtacataagcatgtccaatacgtttgacaacatgccgacgatggcggctgccacagatacgaatatgactaaaccgatgaccatttaaaaaccactctctagctttcacttaaacttatagatcattcttttagcacatgtataatataaaaacattattctatttcgaatttaggcttccaaaaatttttcatccgtaaaccgataataatatatatagacttgttaatggtcggaataaacagattaatgcttaaactatcgtcatcaccacgattagagatacaatacttacattctttttgctgtttcgaaactttatcaatacacgttaatacaaacccaggaaggagatattgaaactgaggctgttgaaaatgaaacggtgaatacaatagttcagataatgtaaaatcatgattccgtattctgatagtattagaactgttaatggatgcagatggaacgtatctaggtgtatctattttaacaaagcatcgatttgctaatatacaattatccttttgattaattgttattttattcatattcttaaaaggtttcatatttatcaattcttctacattaacaatttccatttttaatttatgcagccccgcaatactcctcattacgtttcattttttttctagaatatccattttgttcatttcggcacatagattatccaattgagaagtgcatttagtagttttgtatattttaagtttattgacgaatcgtcgaaaattagttatagttaacattttattatttgataccctgatattaatacccctgccgttactattatttataactgatgtaacccatgtaacattagaattaattatcgatagtaatgcatcaacgcttccaaaattgtctattataaactcaccgataatttttttattgcatgttttcatattcattaggattatcaaatctttaatcttcttacgattgtatgcgttgatattacaagacgtcattctaaaagacggaggatctccatcaaatgccagacaatcacgtacaaagtacatggaaataggttttgttctattgcgcatcatagattcatatagaactcccatagaaatactaatttgttttactctataaaatactaatgcatctatttcatcgttatgtataacgtctttccaagtgtcaaattccaaatttttttcattgatagtaccaaattcttctatctctttaactatttgcatagataggtaattacagtggtgtctacaagctgttttttgaaactgaatcgatgcatctagaagcgatgctacgctagtcacaatcaccgctttcatatttagaatatatgtatgtaaaaatatagtagaatttcattttgtttttttctatgctataaatgaattctcattttgcatctgctcatactccgttttatatcaataccaaagaaggaagatatctggttctaaaagccgttaaagtatgcgatgttagaactgtagaatgcgaaggaagtaaagcttcctgtgtactcaaagtagataaaccctcatcacccgcgtgtgagagaagaccttcgtccccgtccagatgcgagagaatgaataaccctggaaaacaagtcccgtttatgagaacggacgtgctacaaaatatgtttgctgctaatcgcgacaacgtggcgtcgagacttttgaactaaaatacaattatatctttttcgatattaataaatccgtgtcgcccgggttttttatctctttcagtatgtgaatagataggtattttatctctattcatcatcgaatttaagagatccgataaacattgtttgtattctcccgatgtcagcatctgatacaacaatatatgtgcacataaacctctggcacttatttcatgtaccttccccttatcactaaggagaatagtatttgagaaatatgtatacatgatattatcatgaattagatatacagaatttgtaacactctcgaaatcacacgatgtgtcggcattaagatctaatatatcgctcgataacacattttcatctagatacactagacattttttaaagctaaaatagtctttagtagtaacagtaactatgcgattattttcatcgatgatacatttcatcggcatattattacgcgtaccatcaaagactataccatgtgtatatctaacgtattctagcatagttgccatacgcgcattaaacttttcaggatctttggatagatcttccaatctatctatttgagaaaacatttttatcatgttcaatagttgaaacgttggatccactatatagatattatctataaagattttaggaactacgttcatggtatcctggcgaatattaaaactatcaatgatatgattatcgttttcatcttttatcaccatatagtttctaagatatgggattttacttaatataatattatttcccgtaataaattttattagaaatgccaaatctataagaaaagtcctcgaattagtttgaagaatatctatatcgccgtaccgtatatttggattaattagatatagagaatatgatccgtaacatatacaactcttattatggcgtctaagatattcttccatcaacttattaacatttttgactagggaagatacattatgacgtcccattacttttgccttgtctattaccgcgacgttcatagaatttagcatatctcttgccaattcttccattgatgttacattataagaaattttagatgaaattacatttggagctttaatagtaagaactcctaatatatccgtgtatgtggtcactaatacagattgtagttctataatcgtaaataatttacctatattatatgtttgagtctgtttagaaaagtagctaagtatacgatcttttatttctgatgcagatgtatcaacatcggaaaaaaatctttttttattcttttttactaacgatacaaatatgtctttgttaaaaacagttattttctgaatatttctagcttgtaattttaacatatgatattcgtttacactaggtattctgcctaaataggtttctataatctttaatgtaatattaggaagagtattctgatcaggattcctattcattttgaggatttaaaactctgattattgtctaatatggtctcaacgcaaactttttcacagagcgatagagtttttgataactcgtttttcttaagaaatataaaactactgtctccagagctcgctctatcttttattttatctaattcgatacaaactcctgatactggttcagaaagtaattcattaattttcagtcctttatagaagatagttaatatagatagtacaaaatcttcagttcttgataccgatcggattgatcctagaactagatatattaataaagtactcattaggcagtttatggcagcttgataattagatatagtatattccagttcatatttattagataccgcattgcccagattttgatattctatgaattcctctgaaaataaatctaaaataactagacattctattttttgtggattagtgtactctcttccctctatcatgttcactactggtgtccacgatgacaaatatctagagggaatataatatagtccataggatgccaatctagcaatatcaaataactgtaattttattcttctctcttcattatgaattaattcttgaggtataaacctaacacaaattatattattagacttttcgtatgtaatgtctttcatgttataagtttttaatcctggaatagaatctatcttaatgaggcttttaaatgcggagttctccaacgagtcaaaacataatactctgttgtttttcttatatacgatgttacgattttcttctttgaatggaataggtttttgaattagtttataattacaacataatagatacggaagtgtacaaatagtacgcggaaaaaacataatagctcccctgttttcatccatggttttaagtaaatgatcactggcttccttagtcaatggatattcgaacattaaccgtttcatcatcattggacaaaatccatatttcttaatgtaaagagtaatcaaatcattgtgtttattataccatcttgttgtaaatgtgtattctgttatcggatctgctcctttttctattaaagtatcgatgtcgatctcgtctaagaattcaactatatcgacatatttcatttgtatacacataaccattactaacgtagaatgtataggaagagatgtaacgggaactgggtttgttgattcacaaactattctaatacatagttcttctgttaatacgtcttgtacgtaatctattatagatgccaagatatctatataattattttgtaatatgatgttaactatgtgatctatataagtagtgtaatatttcatgtatttggatatatgttccaactctgtctttgtgatgtctagtttcgtaatatctatagcatcctcaaaaaatatattcgcatatattcccaagtcttcagttctatcttctaaaaaatcttcagcgtatggaatataataatctattttgcctcttctgatgtcattaatgatatagtttttgacactattttccgtcaattgattcttattcactatatctaagaaacggatagcgtccctaggacgaactactgccattaatatctctattatagcttctggacataattcatctattataccagaattaatgggaactattccgtatctatctaacatagttttaagaaagtcagaatctaagacctgatgttcatatattggttcatacatgaaatgatctctattgatgatagtgactatttcattctctgaaaattggtaactcattctatacacgctttccttgttgataaaggatagtatatactcgatggaatttgtaccaacaaactgttctcttatgaatcgtatatcatcatctgaaataatcatgtaaggcatacacttaacaattagagacttgtctcctgttatcaatatactattcttgtgataatttatgtgtgaggcaaatttgtccacgttttttaattttgttatagtagatatcaaatccaatggagctacagttcttggcttaaacagatatagtttttctggaacgaattctacaacattattataaagaactttgggtagataagtgggatgaaatcctattttaattaatgcgatagccttgtcctcgtgcagatatccaaacgcctttgtgatagtatgacattcattgtctagaaacgctctacgaatatctgtaacagatatcatctttagagaatactagtcgcgttaatagtactaaaatttgtattttttaatctatctcaataaaaaaattaatatgtatgattcaatgtataactaaactactaactgttattgataactagaactagaatcagaatctaatgatgacgtaaccaagaagtgtatctacagccaatttagctgcattatttttagcatctcgtttagattttccatctgccttatcgaatactcttccgtcgatgtctacacaggcataaaatgtaggagagttactaggccccactgattcaatacgaaaagaccaatctctcttagttatttggcagtactcattaataatggtgacagggttagcatctttccaatcaataatttttttagccggaataacatcatcgaaagacttatgatcctctctcattgatttttcgcgggatgcatcatctattatggaatcagccatagcatcagcatccggcttatccgcctccattgtcgtaaaccaacgaggaggaatatcgtcggagctgtacaccatagcactacgttgaagatcgtacagagctttattaacttctcgcttctccatattaagttgtctagttagttgtacagcagtagctccttcgagtccaatgtttttaatagcctcacacacaatctctgcgtcagaacgttcgtcgatatagatcttagacatttttagagagaaatgacgcaaaaccagtaataaaactaatctattttatcatttttattcatcatcttctggtggttcgtcgttcctatcgaatgtggctctgattaacccgtcatctataggcgatgctggttctggagattctggaggagatggattattatctggaagaatctctgttatttccttgttttcatgtatcgattgcgttgtaacattaagattgcgaaatgctctaaatttgggaggcttgaagtgttgtttgcaatctctacacgcgtgtctaactaatggaggttcatcagcagctctagtttgaatcatcatcggtgtagtattcctacttttacagttaggacacggtgtattgtatttctcgtcgagaacgttaaaataatcgttgtaactcacatcctttattttatctatattgtattctactcctttcttaatgcattttataccgaacaagagatagcgaaggaattctttttcggtaccgctagtacccttaatcatgtcacatagtgttttatattccaaatttgtggcaatggacggtttatttctatacgatagtttgtttctggaatcctttgagtattctataccaatattattctttgattcgaatttagtttcttcgatattagattttgtattacctatattcttgatgtagtactttgatgatttttccatggcccattctattaagtcttccacgctggtattatcatccacatattgtgatagtaactctcggatatcagtagcggctaccgccattgatgtttgttcatttgatgagtaactactactaatgaatacattttccatttataacacttatgtattaactttgatcatttatattttttcattattatgttgatattaacaaaagtgaatatatatgttaataattatggtgtggtgtgtacggccacaatttcataatgagtggaagtcagtgtcctatgatcaatgacgatctatttagagttactttgaaaagaatgcatccactcaatagtgaggagtcgagtatgaaaatagataagaagaggacaaagtttcagaatagagccaaaatggtaaaagaaataaatcagacaataagagcagcacaaactcattacgagacattgaaacaaggatacctaaaatttaagagaatgattagaactgctactctaaaagatatagcaccatctattccaaaaattcagaaattttataaactattctcggacatttcagccatcagcaaagcatcacagaatccgagtaagatggtatatgctctactgctttacatgtttcccaatttgtttggagatgaccatagattcattcgttatagaatgcatccaatgagcaaaatcaaacacaagatcttctccccgttcaaacttaatcttattagaatattagtggaagaaagattctataataatgaatgcagagattataaatggagaataattggaacacaagttgataaaatattgatagctgaatctgctaaatatacaatagatgcaaggtatcgcctaagacctatatatagaatcaagggagaatctgaagaagataccctcttcatcaaacagatggtagagaaatgtgtaacgtctcaggaattggtggagaaagtgttgaagatactgtttaaagatttgttcaagagtggagaatacaaagattacagatacgatgatgatgtagacaatggattcattggattggacaaactaaaattaaacattgttcacgatatagttgaaccatgtatgcctgttcgtaggccagtggctaaggtactgtgtaaagaaatggtaaataaatactttgagaatcctctacatatcattggtaagaatctccaagagtgcattgactttgttagtgagtaggcatttcatcttttcctttctcaatactattcaacttgttaaattaataatggatagtttaaaatagttattagtagtaataagatagtttaaaatagttattagtagtaataagatagtttaaaatagttattagtagtaataagatagtttaaaatagtataaaatagataagtatttactctcttctataaaaatggattttattcgtagaaagtatcttatatacacagtagaaaataatatagattttttaaaggatgatacattaagtaaagtaaacaattttaccctcaatcatgtattagctctcaagtatctagttagcaatttcccccaacatgttattactaaggatgtattagctaataccaatttttttgttttcatacatatggtacgatgttgtaaagtgtacgaagcggttttacgacacgcatttgatgcacccacgttgtacgttaaagcattgactaagaattatttatcgtttagtaacgcaatacaatcgtacaaggaaaccgttcataaactaacacaagatgaaaaatttttagaggtagccgaatacatggaagaattaggagaacttataggggtaaattatgacttagttcttaatccattatttcacggaggggaacccatcaaagatatggaaatcatttttttaaaactatttaagaaaacagacttcaaagttgttaaaaaattaagtgttataagattacttatttgggcatacctaagcaagaaagatacaggcatagagtttgcggataatgatagacaagatatatatactctatttcaacaaactggtagaatagtccatagcaatctaacagaaacgtttagagattatatctttcccggagataagactagctattgggtgtggttaaacgaaagtatagctaatgatgcggatatcgttcttaatagacccgccattaccatgtatgataaaattcttagttatatatactctgagataaaacagggacgcgttaataaaaacatgcttaagttagtttatatctttgagcctgaaaaagatatcagagaacttctgctagaaattatatatgatattcctggagatatcctatctattattgatgcaaaaaacgacgattggaaaaaatattttattagtttttacaaagctaattttatcaacggtaatacatttattagtgatagaacgtttaacgaggacttattcagagttgttgttcaaatagatcccgaatatttcgataatgaacgaattatgtctttattctctacgagtgctgcggacattaaacgatttgatgagttagatattaataacagttatatatctaatataatttatgaggtgaacgatataacattagatacaatggatgatatgaagaagtgtcaaatctttaacgaggatacatcgtattatgttaaggaatacaatacatacctgtttttgaacgagacggatcccatggtcatagagaacggaatactaaagaaactgtcatctataaaatccaagagtagacgactgaacttgtttagcaaaaacattttaaaatattatttagacggacaattggctcgtctaggtcttgtgttagatgattataagggagacttgttagttaaaattataaaccatctcaagtctgtggaggatgtatcagcattcgttagattttctacagataaaaaccctagtattcttccatcgctaatcaaaactattttagctagttataatatttccatcatcgtcctatttcaaaagtttttaagagataatctatatcatgtagaagaattcttggataaaagcatccatctaaccaagacggataagaaatatatacttcaattgataaggcacggcagatcatagaacaaaccaaatatacatattaaaaattcacacatttttgataaatgggaactgctgcaacaattcagactcccaccaaattaatgaataaagagaatgcagaaatgattttggaaaaaattgttgatcatatagttatgtatattagtaacgaatcaagtgatgaaaataatcctgaatatattgattttcgtaacagatacggagactatagatctctcattataaaaagtgatcacgagtttgtaaagctatgtaaagatcatgccgagaaaagttctccagaaacacaacaaatgataatcaaacacatctacgaacaatatcttattccggtatctgaagtactattaaaacctatgatgtccatgggtgacataattacatataacggatgtaaagacaatgaatggatgatagaacaactctctaccctaaactttaacaatctccgcacatggaactcatgtagcataggcaatgtaacgcgtctgttttatacattttttagttatctgatgaaagataaactaaatatataagtataatcataatcccattctaatactttaacctgatgtattatgtatcacctgcatcttattagaatattaacctaactaaaagacataacataaaaactcattacatagttgataaaaagcggtaggatataaatattatggctgccgccgttccgcgttttgacgacgtgtacaaaaatgcacaaagaagaattctagatcaagaaacattttttagtagaggtctaagtagaccgttaatgaaaaacacatatctatttgataattacgcgtatggatggataccagaaactgcaatttggagtagtagatacgcaaacctagatgctagtgactattatcccatttcgttgggattacttaaaaagtttgagtttctcatgtctctatataaaggtcctattcccgtatatgaagaaaaaataaatactgaattcattgctaatggatctttctccggtagatacgtatcatatcttagaaagttttctgcccttccaacaaacgagtttattagttttttattattgacctccatccctatctataatatcttattctggtttaaaaacacacagtttgatattactaaacacacattattcagatacgtctatacagataatgccaaacacctggcgttggctaggtatatgtatcaaacaggagactataagcctttgtttagtcgtctcaaagagaattatatatttaccggtcctgttccgataggaatcaaagatatagatcaccctaatcttagtagagcaagaagtccatccgattatgagacattagctaatattagtactatattgtactttaccaagtatgatccagtattaatgtttttattgttttacgtacctgggtattcaattactacaaaaattactccagccgtagaatatctaatggataaactgaatctaacaaagagcgacgtaaaactgttgtaaattattttatgcttcgtaaaatgtaggttttgaaccaaacattctttcaaagaatgagatgcataaaactttattatccaatagattgactatttcggacgtcaatcgtttaaagtaaacttcgtaaaatattctttgatcactgccgagtttaaaacttctatcgataattgtttcgtatgttttaatatttacaagttttttggtccatggtccattaggacaaatatatgcaaaataatatcgttctccaagttctatagtctctggattatttttattatattcagtaaccaaatacatattagggttatctgcggatttataatttgaatgatgcattcgactcaacataaacaattctagaggagacgacctactatcaaattcggatcgtaaatctgtttctaaagaacggagaatatctatacatacctgattagaattcatccgtccttcagacaacatctcagacagtctggtcttgtatatcttaatcatgttcttatgaaacttggaaacatctcttctagtttcactagtacctttattaattctctcaggtacagattttgaattcgacgatgccgagtatttcatcgttgtatatttcttcttcgattgcataattagattcttatatacagcctcaaactctattttaaaattattaaacaatactctactattaatcagtcgttctaactcctttgctatttctatggacttatcgacatcttgactgtctatctctgtaaacacggagtcggtatctccatacacgctacgaaaacgaaatctgtaatctataggcaacgatgttttcactatcggattaatatctctatcgtccatataaaatggattacttaatggattggcaaaccgtaacataccgttagataactctgctccatttagtaccgattctagatacaagatcattctacgtcctatggatgtgcaactcttagccgaagcgtatgagtatagagcactatttctaaatcccatcagtccatacaccgagttggctactatcttgtacgtatattgcatggaatcatagatggccttttcagttgaactggtagcctgttttaacatctttttatatctggctctctctgccaaaaatgttctcaatagtctaggaatggttccttctatcgatctatcgaaaattgctatttcagagatgaggttcggtagtctaggttcacaatgaaccgtaatatatctaggaggtggatatttctgaagtaagagctgattatttatttcttcttccaatctattggtactaacgacgacaccgactaatgtttccggagatagatttccaaagatacacacattaggatacagactgttataatcaaagattaatacattattactaaacattttttgttttggagcaaataccttaccgccttcgtatggaaacttttgttttgtttctgatctcactaagatggttttagtttccaacaatagctttaacagtggacccttgatgactgtactcgctctatattcgaataccattgattgaggaagcacatatgttgacgcacccgcatctgtttttgtttctactccgtaatactcccacaaatactgacacaagcaagcatcatgaatacagtatctagccatatctaaagctatgtttagattataatccttatacatctgtgctagatcaacgtcatcctttccgaaagataatttatacgtatcatttgttaaagtgggacacgatagaacgaccttgaatccattttcccaaatatctttatgaattactttacatataatatcatcatcaaccgtcacataattacccgtggttaaaacctttgcgaatgcagcggctttgcctttagcgtccgtagtatcgtcaccgatgaacgtcatttctctaactcctctatttaatactttgcccatgcaactgaacgcgttcttggatatagaatccaatttgtacgaatccaatttttcagacttttgaatgaatgaatacagatcgaaaaatatagttccattattgttattaacgtgaaacgtagtattggccatgccacctactcccttgtgactagactgatttctctcataaatacagagatgtacagcttcctttttgtctggagatctaaagataatcttctctccggttaataactctagacgattagtaatatatctcagatcaaagttatgtccgttaaaggtaacgatatagtcgaacgttagttccaacaattgtttagctatttgtagcaaaactatttcagaacacagaactagttctcgttcataatccatttccatcagtgactgtatcctcaaacatcctctatcgacggcttcttgtatttcctgttccgttaacatctcttcattaatgagcgtaaacaataatcgtttaccgcttaaatcgatataacagtaacttgtatgcgagattggattaataaatacagaaggaaatttcttatcaaagtgacactctatatctagaaataagtacgatcttggaatatcgaatctaggtatttctttagcgaaacagttacgtggatcgtcgcaatgataacatccattgttaatctttgtcaaatattgctcgtccaacgagtaacatccgtctggagatatcccgttagaaatataaaaccaactaatattgagaaattcatccatggtggcattttgtatgttgcgtttctttggctcttctatcaaccacatatctgcgacggagcattttctatctttaatatctaaattataacttatcgtctcatcaatgtctatagttctcatctttcccatcggtctcgcattaaatggaggaggagccaatgactgatatatttcgtccgtcactacgtaataaaagtaatgaggaaatcgtataaatacggtctcgccatttcgacatctggatttcagatataaaaatctgttttcaccccgactttcgaaccaattaatgcaccgaacatccatttctagaatttagaaatatattttcatttaaatgaatcccaaacattggggaagagccgtatggaccattatttttatagtactttctcaagcgggtttagacggcaacatagaagcgtgtaaacgaaaactatatactatagtcagcacgcttccatgtcctgcatgtagacggcacgcgactatcgctatagaggacaataatgtcatgtctagcgatgatctgaattatatttattattttttcatcagattatttaacaatttggcatctgataccaaatacgcaatcgatgtgtcaaaggttaaacctttataaacttaacccattataaaacttatgattagtcacgactgaaataacggcgtgattattttttggtataattctacacggcatagtttctgtgactatgaattcaacacccgttatcttagtgaaatctttaacaaacagcaagggttcgtcaaagacataaaactcattgtttacgatcgaaatagatcccctatcacacttaaaataaaaaatatccttatcctttaccaccaaataaaattctgattggtcaatgtgaatgtattcacttaacagttccacaaatttatttattaactccgaggcacatacatcgtcggtattttttatggcaaactttactcttccagcatccgtttctaaaaaaatattaacgagttccatttatatcgtccaatattattgaaatgacgttgatggacagatgatacaaataagaaggtacggtacctttgtccaccatctcctccaattcatgctctattttgtcattaactttaatgtgtgaaaacagtactccacatgcttccatgacagtgtgtaacactttggatacaaaatgtttgacattagtataattgtccaagactgtcaatctataatagatagtagctataatatattctatgatggtattgaagaagatgacaaccttggcatattgatcatttaacacagacatggtatcaacagatagcttgaatgaaagagaatcagtaattggaataagcgtcttctcgatggagtgtccgtataccaacatgtctgatattttgatgtattccattaaattatttagttttttctttttattctcgttaaacagcatttctgtcaatggaccccaacatcgttgaccgattaagttttgattgatttttccatgtaaggcgtatctagtcagatcgtatagcctatccaataatccatcatctgtgcgtagatcacatcgtacactttttaattctctatagaagagcgacagacatctggagcaattacagacagcaatttctttattctctacagatgtaagatacttgaagacattcctatgatgatgcagaattttggataacacggtattgatggtatctgttaccataattcctttgatggctgatagtgtcagagcacaagatttccaatctttgacaatttttagcaccattatctttgttttgatatctatatcagacagcatggtgcgtctgacaacacagggattaagacggaaagatgaaatgattctctcaacatcttcaatggataccttgctattttttctggcattatctatatgtgcgagaatatcctctagagaatcagtatcctttttgatgatagtggatctcaatgacatgggacgtctaaaccttcttattctatcaccagattgcatggtgatttgtcttctttcttttatcatgatgtaatctctaaattcatcggcaaattgtctatatctaaaatcataatatgagatgtttacctctacaaatatctgttcgtccaatgttagagtatctacatcagttttgtattccaaattaaacatggcaacggatttaattttatattcctctattaagtcctcgtcgataataacagaatgtagataatcatttaatccatcgtacatggttggaagatgcttgttgacaaaatctttaattgtcttgatgaaggtgggactatatctaacatcttgattaataaaatttataacattgtccataggatactttgtaactagttttatacacatctcttcatcggtaagtttagacagaatatcgtgaacaggtggtatattatattcatcagatatacgaagaacaatgtccaaatctatattgtttaatatattatatagatgtagcgtagctcctacaggaatatctttaactaagtcaatgatttcatcaaccgttagatctattttaaagttaatcatataggcattgatttttaaaaggtatgtagccttgactacattctcattaattaaccattccaagtcactgtgtgtaagaagattatattctatcataagcttgactacatttggtcccgataccattaaagaattcttatgatataaggaaacagcttttaggtactcatctactctacaagaattttggagagccttaacgatatcagtgacgtttattatttcaggaggaaagaatctaacattgagaatatcggaattaatagcttccagatacagtgattttggcaatagtccgtgtaatccataatccagtaacacgagctggtgcttgctagacaccttttcaatgtttaatttttttgaaataagctttgataaagccttcctcgcaaattccggatacatgaacatgtcggcgacatgattaagtattgttttttcattattttctcaacaagttctcaataccccaatagatgatagaatatcacccaatgcgtccatgttgtctatttccaacaggtcgctatatccaccaatagaagttttcccaaaaaagattctaggaacagttctaccaccagtaatttgttcaaaataatcccgcaattcattttcgggtttaaattctttaatatcgacaatttcatacgctcctcttttgaaactaaacttatttagaatatccagtgcatttctacaaaaaggacatgtatacttgacaaaaattgtcactttgttattggccaacctttgttgtacaaattcctcggccattttaatatttaagtgatataaaactatctcgacttatttaactctttagtcgagatatatggacgcagatagctatatgatagccaactacagaaggcaaacgctataaaaaacataattacgacgagcatatttataaatatttttattcagcattacttgatatagtaatattaggcacagtcaaacattcaaccactctcgatacattaactctctcattttctttaacaaattctgcaatatcttcgtaaaaagattcttgaaactttttagaatatctatcgactctagatgaaatagcgttcgtcaacatactatgttttgtatacataaaggcgcccattttaacagtttctagtgacaaaatgctagcgatcctaggatcctttagaatcacatagattgacgattcgtctctcttagtaactctagtaaaataatcatacaatctagtacgcgaaataatattatccttgacttgaggagatctaaacaatctagttttgagaacatcgataagttcatcgggaatgacatacatactatctttaatagaactcttttcatccagttgaatggattcgtccttaaccaactgattaatgagatcttctattttatcattttccagatgatatgtatgtccattaaagttaaattgtgtagcgcttctttttagtctagcagccaatactttaacatcactaatatcgatatacaaaggagatgatttatctatggtattaagaattcgtttttcgacatctgtcaaaaccaattcctttttgcctgtatcatccagttttccatcctttgtaaagaaattattttctactagactattaataagactgataaggattcctccataattgcacaatccaaactttttcacaaaactagactttacaagatctacaggaatgcgtacttcaggtttcttagcttgtgattttttcttttgcggacattttctagtaaccaactcatctaccatttcattgattttagcagtgaaataagctttcaatgcacgggcactgatactattgaaaacgagttgatcttcaaattccgccatttaagtttaccaaacaacttttaaatacaaatatatcaatagtagtagaataagaactataaaaaaaataataattaaccaataccaaccccaacaaccggtattattagttgatgtgactgttttctcatcacttagaacagatttaacaatttctataaagtctgtcaaatcatcttccggagaccccataaatacaccaaatatagcggcgtacaacttatccatttatacattgaatattggcttttctttatcgctatcttcatcatattcatcatcaatatcaacaagtcccagattacgagccagatcttcttctacattttcagtcattgatacacgttcactatctccagagagtccgataacgttagccaccacttctctatcaatgattagtttcttgagtgcgaatgtaatttttgtttccgttccggatctatagaaaactacaggtgtgataattgccttggccaattgtctttctcttttactgagtgattctagttcaccttctatagatctgagaatggatgattctccagccgaaacatattctaccatggctccgtttaatttgttgatgaagatggattcatccttaaatgttttctctgtaatagtttccaccgaaagactatgcaaagaatttggaatgtgttccttgtgcttaatgtttccatagacggattctagaagttgatacaacataggactagccgcggtaacttttatttttagaaagtatccatcgcttctatcttgtttagatttatttttataaagtttagtctctccttccaacataataaaagtggaagtcatttgactagataaactatcagtaagttttatagagatagacgaacaattagcgtattgagaagcatttagtgtaacgtattcgatacattttgcattagatttactaatcgattttgcatactctataacacccgcacaagtctgtagagaatcgctagatgcagtaggtcttggtgaagtttcaactctcttcttgattaccttactcatgattaaacctaaataattgtactttgtaatataatgatatatattttcactttatctcatttgagaataaaaatgtttttgtttaaccactgcatgatgtacagatttcggaatcgcaaaccaccagtggttttattttatccttgtccaatgtgaattgaatgggagcggatgcgggtttcgtacgtagatagtacattcccgtttttagaccgagactccatccgtaaaaatgcatactcgttagtttggaataactcggatctgctatatggatattcatagattgactttgatcgatgaaggctcccctgtctgcagccatttttatgatcgtcttttgtggaatttcccaaatagttttataaactcgcttaatatcttctggaaggtttgtattctgaatggatccaccatctgccataatcctattcttgatctcatcattccataattttctctcggttaaaactctaaggagatgcggattaactacttgaaattctccagacaatactctccgagtgtaaatattactggtatacggttccaccgactcattatttcccaaaatttgagcagttgatgcagtcggcataggtgccaccaataaactatttctaagaccgtatgttctgattttatcttttagaggttcccaattccaaagatccgacggtacaacattccaaagatcatattgtagaataccgttactggcgtacgatcctacatatgtatcgtatggtccttccttctcagctagttcacaactcgcctctaatgcaccgtaataaatggtttcgaagatcttcttatttagatcttgtgcttccaggctatcaaatggataatttaagagaataaacgcgtccgctaatccttgaacaccaataccgataggtctatgtctcttattagagatttcagcttctggaataggataataattaatatctataattttattgagatttctgacaattactttgaccacatccttcagtttgagaaaatcaaatcgcccatctattacaaacatgttcaaggcaacagatgccagattacaaacggctacctcattagcatccgcatattgtattatctcagtgcaaagattactacacttgatagttcctaaattttgttgattactctttttgttacacgcatccttataaagaatgaatggagtaccagtttcaatctgagattctataatcgctttccagacgactcgagcctttattatagatttgtatctcctttctctttcgtatagtgtatacaatcgttcgaactcgtctccccaaacattgtccaatccaggacattcatccggacacatcaacgaccactctccgtcatccttcactcgtttcataaagagatcaggaatccaaagagctataaatagatctctggttctatgttcctcgtttcctgtattctttttaagatcgaggaacgccataatatcagaatgccacggttccaagtatatggccataactccaggccgtttgtttcctccctgatctatgtatctagcggtgttattataaactctcaacattggaataataccgtttgatataccattggtaccggagatatagcttccactggcacgaatattactaattgatagacctattccccctgccattttagagattaatgcgcatcgttttaacgtgtcatagataccctctatgctatcatcgatcatgttaagtagaaaacagctagacatttggtgacgactagttcccgcattaaataaggtaggagaagcgtgcgtaaaccatttttcagaaagtagattgtacgtctcgatagctgagtctatatcccattgatgaattcctactgcgacacgcattaacatgtgctgaggtctttcaacgatcttgttgtttattttcaacaagtaggatttttccaaagttttaaaaccaaaatagttgtatgaaaagtctcgttcgtaaataataaccgagttgagtttatccttatatttgttaactatatccatggtgatacttgaaataatcggagaatgtttcccatttttaggattaacatagttgaataaatcctccatcacttcactaaatagtttttttgtttccttgtgtagatttgatacggctattctggcggctagaatggcataatccggatgttgtgtagtacaagtggctgctatttcggctgccagagtgtccaattctaccgttgttactccattatatattccttgaataaccttcatagctattttaataggatctatatgatccgtgtttaagccataacataattttctaatacgagacgtgattttatcaaacatgacattttccttgtatccatttcgtttaatgacaaacatttttgttggtgtaataaaaaaattatttaacttttcattaatagggatttgacgtacgtagcgtacaaaatgatcgttcctggtatatagataaagagtcctatatatttgaaaatcgttacggctcgattaaactttaatgattgcatagtgaatatatcattaggatttaactccttgactatcatggcggcgccagaaattaccatcaaaagcattaatacagttatgccgatcgcagttagaacggttatagcatccaccatttatatctaaaaattagatcaaagaatatgtgacaaagtcctagttgtatactgagaattgacgaaacaatgtttcttacatatttttttcttattagtaactgacttaatagtaggaactggaaagctagacttgattattctataagtatagatacccttccaaataatattctctttgataaaagttccagaaaatgtagaattttttaaaaagttatcttttgctattaccaagattgtgtttagacgcttattattaatatgagtaatgaaatccacaccgcctctagatatcgcttttatttccacattagatggtaaatccaatagtgaaactatctttttaggaatgtatggactcgcgtttagaggagtgaacgtcttgggcgtcggaaaggatgattcgtcaaacgaataaacaatttcacaaatggatgttaatgtattagtaggaaatttcttgacgctagtggaattgaagattctaatggatgatgttctacctatttcatccgataacatgttaatttccgacaccaacggttttaatatttcgatgatatacggtagtctctctttcggacttatatagcttattccacaatacgagtcattatatactccaaaaaacaaaataactagtataaaatctgtatcgaatgggaaaaacgaaattatcgacataggtatagaatctggaacattgaacgtattaatacttaattctttttctgtggtaagtaccgataggttattgacattgtatggttttaaatattctataacttgagacttgatagatattagtgatgaattgaaaattatttttatcaccacgtgtgtttcaggatcatcgtcgacgcccgtcaaccaaccgaatggagtaaaataaatatcattaatatatgctctagatattagtatttttatcaatcctttgattatcatcttctcgtaggcgaatgattccatgatcaagagtgatttaagaacatcctccggagtattaatgggcttagtaaacagtccatcgttgcaataataaaagttatccaagttaaaggatattatgcattcgtttaaagatatcacctcatctgacggagacaattttttggtaggttttagagactttgaagctacttgtttaacaaagttattcatcgtcgtttactattctatttaattttgtagttaatttatcacatatcacattaattgactttttggtccatttttccatacgtttatattcttttaatcctgcgttatccgtttccgttatatccagggatagatcttgcaagttaaatagaatgctcttaaataatgtcatttttttatccgctaaaaatttaaagaatgtataaacttttttcaaagatttaaaacttttaggtggagttctagtacacaatatcataaacaaactaataaacatcccgcattcagattccaacagctgattaacttccacattaatacagcctattttcgctccaaatgtacattcgaaaaatctgaataaaacatcgatgtcacaatttgtattatccaatacagaatgtttgtgattcgtgttaaaaccatcggagaaggaataaaaataaaaattattatagtggtggaattcagttggaatattgcctccggagtcataaaaggatactaaacattgttttttatcataaattacacatttccaatgagacaaataacaaaatccaaacattacaaatctagaggtagaacttttaattttgtctttaagtatatacgataagatatgtttattcataaacgcgtcaaatttttcatgaatcgctaaggagtttaagaatctcatgtcaaattgtcctatataatccacttcggatccataagcaaactgagagactaagttcttaatacttcgattgctcatccaggctcctctctcaggctctattttcatcttgacgacctttggattttcaccagtatgtattcctttacgtgataaatcatcgattttcaaatccatttgtgagaagtctatcgccttagataccttttctcgtagtcgaggtttaaagaaatacgctaacggtatactagtaggtaactcaaagacatcatatatagaatggtagcgcatctttaactcgtcagttagctctttcttttgatcgagttcgtcgctactattgggtctactcaggtgcccagactctactagttccaacatcataccgataggtatacaagacactctgccagcggttgtagatttatcatatttctctactacatatccgttacaatttgttaagaatttagatacatctatattgctacataatccagctagtgaatatatatgacataataaattggtaaatcctagttctggtattttactaattactaaatctgtatatctatccatttatcatggaaaagaatttacccgatatcttcttttttccaaactgcgttaatgtattctcttacaaatattcacaagatgaattcagtaacatgagcaaaacggaacgtgcaagtttctcattggcagtgtttccagtgataaaacatagatggcataacgcacacgttgtaaaacataaaggaatatacaaagttagtgcagaagcacgtggagaaaaagtatctcctccatcactaggaaaacctgtttacataaacctaactacgaggcaatatatatacagtgagtatgcaataagctttgaatgttatagttttctaaaatgtataacaaatacagaaatcaattcgttcgatgattatatattaagaggactattggaagcgggtaatagtttacagatattttccaattctgtgggtaaacggatagatactgtaggtgtactagggaacaagtatccgtttagtaaaattccattggcctcattaactccgaaagcacaacgagagatattttcagcgtggatttctcatagacctgtagttttaactggaggaaccggagtgggtaagacgtcacaggtacccaagttattgctttggtttaattatttatttgggggattctctactctagataaaatcactgactttcacgaaagaccagtcattctatctcttcctaggatagctttagttagattgcatagcaataccattttaaaatcattgggatttaaggtactaaatggatctcctatttctttacggtacggatctataccggaagaattaataaacaaacaaccaaaaaaatatggaattgtattttctacccataagttatctctaacaaaactatttagttatggcactcttattatagacgaagttcatgagcatgatcaaataggagatattattatagcagtagcgagaaagcatcatacgaaaatagattctatgtttttaatgactgccacattagaggatgacagagaacgtctaaaagtatttttacccaatcccgcatttatacatattcctggagatacactgtttaaaattagcgaggtatttattcataataagataaatccatcttccagaatggcatacatagaagaagaaaagagaaatttagttactgctatacagatgtatactcctcctgatggatcatccggcatagtcttcgtggcatccgttgctcaatgtcatgaatataaatcatatttagaaaagagattgccgtacgatatgtatattattcatggtaaggtcttagatatagacgaaatattagagaaagtgtattcatcacctaacgtatcgataattatttctactccttatttggaatccagcgttactatacgcaatgttacacacatttatgatatgggtagagtttttgttcctgctccttttggaggatcgcaacaatttatttctaaatctatgagagatcaacgaaaaggaagagtaggaagagttaatcctgggacatacgtctatttctatgatctgtcatacatgaagtctatacagcgaatagattcagaatttctacataattatatattatacgctaataagtttaatctaacactccccgaagatttgtttataattcctacaaatttggatgttctgtggcgtacaaaggaatatatagactcgttcgatattagtacagaaacatggaataaattattatccaattattatatgaagataatagagtatgcgaaactttatgtactaagtcctattctcgctgaggagttggataactttgagagaactggagaattaactagtacggtaaaagaagccattttatctctaaatttacgaattaagattttaaattttaaacataaagatgaggatacgtatatacacttttgtagagtattatttggtgtctataacggaacaaacgctactatatattatcatcgccctctaactggatatatgaatatgatttcagatactatatttgttcctgtagataataactaaaaatcaaactctaattaccacatctttttttagagatgaaaaattttccacatctccttttgtagacacgactaaacattttgcagaaaaacgtttattattatttagataatcgtatacttcatcagtgtagatagtaaatgtgaacagataaaaggtattcttgctcaataaattggtaaattccatagaatatattaatcctttcttcttgagatcccacatcatttcaaccaaagacgttttatccaatgatttacctcgtactataccacatacaaaactagattttgcagtgacgtcgtacctggtattcctaccaaacaaaattttacttttagttcttttagaaaattctaaggtagaatctctatttgccaatatgtcatctatggaattaccactagcaaaaaatgatagaaatatatattgatacatcgcagctggttttgatctactatactttaaaaacgaatcagattccataatggcctgtatatcatccgccgaaaaactatgttttacacgtattccttcggcatttctttttaatgatatatcttgtttagataatgataaagttatcatgtccatgagagacgcgtctccgtatcgtataaatatttcattagatgttagacgcttcattaggggtatacttctataaggtttcttaatcagtccatcattggttgcgtcaagaactactatcggatgttgttgggtatctctagtgttacacatggccttactaaagtttgggtaaataactatgatatctctattaattatagatgcatatatttcattcgtcaaggatattagtatcgacttgctatcgtcattaatacgtgtaatgtaatcatataaatcatgtgatagccaaggaaaattcaaatagatgttcatcatataatcgtcgctataattcatattaatactttgacattgactaatttgtaatatagcctcgccacgaagaaagctctcgtattcagtttcatcgataaaggataccgttaaatataactggttgccgatagtctcatagtctattaagtggtaagtttcgtacaaatacagaatccctaaaatattatctaatgttggattaatctttaccataactgtataaaatggagacggagtcataactattttaccgtttgtacttactggaatatatgaaggaataatctccgggcatgctggtaaagacccaaatgtctgtttgaagaaatccaatgttccaggtcctaatctcttgacaaaaattacgatattcgatcccgatatcctttgcattctatttaccagcatatcacgaactatattaagattatctatcatgtctattctcccaccgttatataaatcgcctccgctaagaaacgttagtatatccatacaatggaatacctcatttctaaaatagtattcgttttctaattctttaatgtgaaatcgtatactagaaagggaaaaattatctttgagttttccgttagaaaagaaccacgaaactaatgttctgattgcgtctgactccgtcgctgaattaatggatttacaccaaaaactcatataacttctagatgtagaagcattcgctaaaaaattagtagaatcaaaggatataagtagatgttccaacaagtgagcaattcccaagatttcatctatatcattctcgaatccgaaattagaaattcccaagtagatatcctttttcatccgatcattgatgaaaatacgaactttattcggtaagacgatcatttactaaggagtaaaataggaagtaatgttcgtatatcgttatcgtcgtataaattaaaggtgtgttttttgccattaagtgacattataattttaccaatattggaattataatataggtgtatttgagcactagaaacggtcgatgcatcggtaaatatagctgtatctaatgttctagtcggtatttcatcatttcgctgtctaataatagcgttttctctatctgtttccagcacagctgcctgaagtttattggtaggataatatgtaaaataataagaaatacatacgaataacaaaaataaaataagatataataaagatgccatttagagatctaattttgttcaacttgtccaaattcctacttacagaagatgaggaatcgttggagatagtatcttccttatgtagaggatttgaaatatcttacgatgacttaatatcgtactttccagataggaaataccataaatatatttctaaggtatttgaacatgtagatttatcggaggaattaagtatggaattccatgatacaactctgagagatttagtctatcttagattgtacaagtattccaagtatatacggccgtgttataaattaggagataatctaaaaggtatagttgttataaaggacagaaatatatatattagagaagcaaatgatgacttgatagaatatctcctcaaggaatacactcctcagatttatacatattctaatgagcgcgtccccatagctggttcaaaattaattctttgcggattttctcaagttacatttatggcgtatacaacgtcgcatataacaacaaataaaaaggtagatgttctcgtttccaaaaaatgtatagatgaactagtcgatccaataaattatcaaatacttcaaaatttatttgataaaggaagtggaacaataaacaaaatactcaggaagatattttattcggtaacaggtggccaaactccataggtagctttttctatttcggattttagaatttccaaattcaccagcgatttatcggttttggtgaaatccaaggatttattaatgtccacaaatgccatttgttttgtctgtggattgtatttgaaaatggaaacgatgtagttagatagatgcgctgcaaagtttcctattagggttccgcgctttacgtcacccaacatacttgaagcaccatcctttaaaaaaaatgataagatatcaacatggagtatatcatactcggattttaattcttctactgcctcactgacattttcacaaatactacaatacggtttaccgaaaataatcagtacgttcttcatttatgggtatcaaaaacttaaaatcgttactgctggaaaataaatcactgacgatattagatgataatttatacaaagtatacaatggaatatttgtggatacaatgagtatttatatagccgtcgccaattgtgtcagaaacttagaagagttaactactgtattcataaaatacgtaaacggatgggtaaaaaagggagggcatgtaaccctttttatcgatagaggaagtataaaaattaaacaagacgttagagacaagagacgtaaatattctaaattaaccaaggacagaaaaatgctagaattagaaaagtatacatcagaaatacaaaatgttaccggatttatggaagaagaaataaaggcagaaatgcaattaaaaatcgataaactcacatttcaaatatatttatctgattctgataacataaaaatatcattgaatgagatactaacacatttcaacaataatgagaatgttacattattttattgtgatgaacgagacgcagaattcgttatgtgtctcgaggctaaaacacatttctctaccacaggagaatggccgttgataataagtaccgatcaggatactatgctattcgcgtctgctgataatcatcccaagatgataaaaaacttaactcatctgtttaaatttgttccctcggcagaggataactatttagcaaaattaacggcgttagtgaatggatgtgatttctttcctggactctatggggcatctataacacccaccaacttaaacaaaatacaattgtttagcgattttacaatcgataatatagtcactagtttggcaattaaaaattattatagaaagactaactctaccgtagacgtgcgtaatattgttacgtttataaatgattacgctaatttagacgatgtctactcgtatgttcctccttgtcaatgcactgttcaagaatttatattctccgcattagatgaaaaatggaacgattttaaatcatcttatttagagagcgtgccattaccctgtcaattaatgtacgcgttagaaccacgtaaggagattgatgtttcagaagttaaaactttatcatcttatatagatttcgaaaatactaaattagatatcgatgttataaaatctatatcctcgatttttggatattctaacgaaaactgtaacacgatagtgttcggcatctataaggataatttactactgagtataaatagttcattttactttaacgatagtctgttaataaccaatactaaaagtgataatataataaatataggttactagattaaaaatggtgttccaactcgtctgctctacatgtggcaaagatatttctcatgaacgatataaattgattatacgaaaaaaatcattaaaggatgtactagtcagtgtaaagaacgaatgttgtaggttaaaattatctacacaaatagaacctcaacgtaacttaacagtgcaacctctattggatataaactaatatggatatggatccggttaattttatcaagacatatgcgcctagaggttctattatttttattaattatgccatatcattaactagtcatttgaatccatcgatagaaaaacatgtgggtatttattatggtacgttattatcggaacacctggtagttgaatcgacctatagaaaaggagttagaatagtcccattggatagtttttttgaaggatatattagtgcaaaagtatacatgttagagaatattcaagttatgaaaatagcagctgatacgtcattaactttactgggtattccatatggattcggtcatgatagaatgtattgttttaaattggtagctgaatgttataaaaatgccggtgttgatatatcgtctacacgaatattgggcaaagatatttttttgagccaaaacttcacagatgataatagatggataaagatatatgattctaataatttaacactttggcaaattgattaccttaaagggtgagttaatatgcataactactcctccgttattttttccctcgttctttttcttaacgttgtttgccatcactctcataatgtaaagatattctaaaatggtaaacttttgcatatcggacgcagaaattggtataaatgatgtaattgtattatttcccgtcaatggactagtcacggctccatcagttttatatcctttagagtatttctcactagtgtctagcattctagagcattccatgatctgtttatcgttgatattggccggaaagatagattttttattttttattatattactattggcaattgtagatataacttctggtaaatatttttctaccttttcaatctcttctattttcaagccggctatatattctgctatattgttgctagtatcaataccttttctggctaagaagtcatatgtggtattcactatatcagttttaactggtagttccattagcctttccacttctgcagaataatcagaaattggttctttaccagaaaatccagctactataataggctcaccgatgatcattggcaaaatcctatattgtaccagattaatgagagcatatttcatttccaataattctgctagttcttgagacattgatttatttgaggaatctagttggttctctagatactctaccatttctgccgcatacaataacttgttagataaaatcaatgttatcaaagtgtttaacgtggctagaatagtgggtttgcacgtattaaagaatgcggtagtatgcgtaaaccgttttaacgaattatatagtctccagaaatctgtggcgttacatacgtgagccgaatgacatcgaagattgtccaatatttttaatagctgctctttgtccattatttctatatttgactcgcaacaattgtagataccattaatcaccgattcttttttcgatgccggacaatagcacaattgtttagctttggactctatgtattcagaattaatagatatatctctcaatacagattgcactatacattttgaaactatgtcaaaaattgtagaacgacgctgttctgcagccatttaactttaaataatttacaaaaatttaaaatgagcatccgtataaaaatcgataaactgcgccaaattgtggcatatttttcagagttcagtgaagaagtgtctataaatgtagactcgacggatgagttaatgtatatttttgccgccttgggcggatctgtaaacatttgggctattatacctctcagtgcatcagtgttctaccgtggagccgaaaacattgtgtttaatcttccggtgtccaaggtaaaatcgtgtttgtgtagttttcacaatgatgccatcatagatatagaacccgatctggaaaataatctagtaaaactttccagttatcatgtagtaagtgtcgattgtaataaggaactgatgcctattaggacagatactactatttgtctaagtatagatcaaaagaaatcttacgtgtttaattttcacaagtatgaagaaaaatgttgtggtagaaccgtcattcatctagaatggttgttgggctttatcaagtgtattagtcagcatcagcatttggctattatgtttaaagatgacaatattattatgaggactcctggtaatactgatgcattttccagggaatattctatgactgaatgttctcaagaacttcaaaagttttctttcaaaatagctatctcgtctctcaacaaactacgaggattcaaaaagagagtcaatgtttttgaaactagaatcgtaatggataatgacgataacattctaggaatgttgttttctgacagagttcaatcctttaagattaacatctttatggcgtttttagactaatactttcaacgagataaatatgggtggtggagtaagcgttgcgctccctaaacgggatccgcctccgggagtacccactgacgaaatgttattaaacgtggataaaatgcatgacgtgatagctcctgctaagcttttagaatatgtgcatataggaccgctagcaaaagataaagaggataaagtaaagaaaagatatccagagtttagattagtcagcacaggacccggtaatctttcggcattattaagacaatcgtataatggaaccgcacccaattgctgtcgcacttttaaccgtactcattattggaagaaggatggaaagatatccgataagtatgaagatggtgcagtattagaatcgtgttggcccgacgtccacgacactggaaaatgcgatgttgatttattcgactggtgtcagggggatacgttcgatagaaacatatgccatcaatggatcggttcagcatttaataggagtgatagaacggcagagggtcaacaatcgttaataaatctgtacaataagatgcaaacattatgtactaaagatgctagtgtgccaatatgtgaatcatttttgcatcatttacgcgcacacaatacagaagatagccaagagatgatcgactatattttaagacaacagtccgcagattttaagcagaaatatatgagatgtagttatcccaccagagataagttagaagagtcactaaaatatgcggaacctcgagaatgttgggatccagagtgttcgaatgccaatgttaatttcttgctaacacgtaattataataatttagggctatgcaatattgtacgatgtaataccagcgtgaacaacttacagatggataaaacttcctcattaagattatcctgtggattaagcaatagtgatagattttctactgttcccgtcaatagagcaaaagtagttcaacataatattaaacattcgttcgacctaaaattgcatttgatcagtttattatctctcttggtaatatggatactaattgtagctatttaaatgggcgccgcggcaagcatacaaacgacggtgaatacactcagcgaacgtatctcgtctaaattagaacaagaagcgaacgctagtgctcaaacaaaatgtgatatagaaattggaaatttttatatccgacaaaaccatggatgtaacctcactgttaaaaatatgtgctccgcggacgcggatgctcagttggatgctgtgttatcagccgctacagaaacatatagtagtttaacaccggaacaaaaagcatacgtacctgctatgtttactgccgcgttaaacattcaaacgagtgtaaacactgttgttagagattttgaaaattatgtgaagcagacttgtaattctagcgcggtcgtcgataacaaattaaagatacaaaacgtaattatagatgaatgttatggagccccaggatcaccaacaaatttggaatttattaatacaggatctagcaaaggaaattgtgccattaaggcgttgatgcaattgacgactaaggccactactcaaatagcacctagacaagttgctggttcaggagttcaattttatatgatagttatcggtgttataatattggcagcgttgtttatgtactatgccaagcgtatgctattcacatccaccaatgataaaatcaaacttattttagcaaataaggaaaacgtccattggactacttacatggacacattctttagaacttctccgatggttatcgctaccacggatatacaaaactgaaaatatattgataatattttaatagattaacatggaagttatcgctgatcgtctagacgatatagtggaacaaaatatagcggatgaaaaatttgtagattttgttatacacggtctactagaacatcaatgtccctccatacttcggccattacttaggttgttgattgatatactattatttgttatagtaatttatatttttacggtacgtctggtacgtagaaattatcaaatgttgttggtgttggtggcgctagtcatcgcgttaactattttttattactttatactataatagtactagactgacttctaacaaacatctcacctgccataaataaattcttgatattaaagtcttctatttctaacactattccatctgtggaaaataatactctgacattatcgctaattgacacatcggtgagtgatatgcctataaagtaataatcttctttgggcacatataccagtgtaccaggttctaacaacctatttactggtgctccagtagcatactttttctttaccttaagaatatccatcgtttgcttagtcaatagcgataggtgattttttatcaaccactcgaaaaagtaattggagtgttcatatcctctacgggctattgtctcatgtccgtgtatgaaatttaagtaacacgactgtggtagatttgttctatagagccggttgccgcaaatagatagaactaccaatacatctgtacaaatgttaaacattaattgattaacagaaaaaacaatgttcgttctgggaatagaaaccagatcaaaacaaaattcgttagaatatatgccacgtttatacattgaatataaaataactacagtttgaaaaataacagtatcatttaaacatttaacttgcggggttaatctcacaactttactgtttttgaactgttcaaaatatagcatagatccatgagaaatacgtttagccgcctttaatagaggaaatcccaccgcctttctggatctcaccaacgacgatagttctgaccagcaactcatttcttcatcatccacctgttttaacatataataggcaggagatagatatccgtcattgcaatattccttctcgtaggcacacaatctaatattgataaaatctccattctcttctctgcatttattatcttgtttcggtggctgattaggctgtagtcttggtttaggctttggtatatcgttgttgaatctattttggtcattaaatctttcatttcttcctggtatatttttatcacctcgtttggttggatttttgtctatattatcgtttgtaacatcggtacgggtattcatttatcacaaaaaaaacttctctaaatgagtctactgctagaaaaccttatcgaagaagataccatattttttgcaggaagtatatctgagtatgatgatttacaaatggttattgccggcgcaaaatccaaatttccaagatctatgctttctatttttaatatagtacctagaacgatgtcaaaatatgagttggagttgattcataacgaaaatatcacaggagcaatgtttaccacaatgtataatataagaaacaatttgggtctaggagatgataaactaactattgaagccattgaaaactatttcttggatcctaacaatgaggttatgcctcttatcattaataatacggatatgactgccgtcattcctaaaaaaagtggtaggagaaagaataagaacatggttattttccgtcaaggatcatcacctatcttgtgtattttcgaaactcgtaaaaagattaatatttataaagaaaatatggaatccgcgtcgactgagtatacacctatcggagacaacaaggctttgatatctaaatatgcgggaattaatgtcctgaatgtgtattctccttccacatccatgagattgaatgccatttacggattcaccaataaaaataaactagagaaacttagtactaataaggaactagaatcgtatagttctagccctcttcaagaacccattaggttaaatgattttctgggactattggaatgtgttaaaaagaatattcctctaacagatattccgacaaaggattgattactataaatggagaatgttcctaatgtatactttaatcctgtgtttatagagcccacgtttaaacattctttattaagtgtttataaacacagattaatagttttatttgaagtattcgttgtattcattctaatatatgtattttttagatctgaattaaatatgttcttcatgcctaaacgaaaaatacccgatcctattgatagattacgacgtgctaatctagcgtgtgaagacgataaattaatgatctatggattaccatggatgacaactcaaacatctgcgttatcaataaatagtaaaccgatagtgtataaagattgtgcaaagcttttgcgatcaataaatggatcacaaccagtatctcttaacgatgttcttcgcagatgatgattcattttttaagtatttggctagtcaagatgatgaatcttcattatctgatatattgcaaatcactcaatatctagactttctgttattattattgatccaatcaaaaaataaattagaagccgtgggtcattgttatgaatctctttcagaggaatacagacaattgacaaaattcacagactctcaagattttaaaaaactgtttaacaaggtccctattgttacagatggaagggtcaaacttaataaaggatatttgttcgactttgtgattagtttgatgcgattcaaaaaagaatcctctctagctaccaccgcaatagatcctgttagatacatagatcctcgtcgcaatatcgcattttctaacgtgatggatatattaaagtcgaataaagtgaacaataattaattctttattgtcatcatgaacggcggacatattcagttgataatcggccccatgttttcaggtaaaagtacagaattaattagacgagttagacgttatcaaatagctcaatataaatgcgtgactataaaatattctaacgataatagatacggaacgggactatggacgcatgataagaataattttgaagcattggaagcaactaaactatgtgatgtcttggaatcaattacagatttctccgtgataggtatcgataaaaatatagtagaatttcattttgtttttttctatgctataaataggatccgataaagtgaaaaataattctaatttattgcacggtaaggaagtagaatcataaagaatcgaattgcggccgctctagaactagtggatcccccgggctgcaggaattcgatatcaagcttgccacaaccatggtgagcaagggcgaggagctgttcaccggggtggtgcccatcctggtcgagctggacggcgacgtaaacggccacaagttcagcgtgtccggcgagggcgagggcgatgccacctacggcaagctgaccctgaagttcatctgcaccaccggcaagctgcccgtgccctggcccaccctcgtgaccaccctgacctacggcgtgcagtgcttcagccgctaccccgaccacatgaagcagcacgacttcttcaagtccgccatgcccgaaggctacgtccaggagcgcaccatcttcttcaaggacgacggcaactacaagacccgcgccgaggtgaagttcgagggcgacaccctggtgaaccgcatcgagctgaagggcatcgacttcaaggaggacggcaacatcctggggcacaagctggagtacaactacaacagccacaacgtctatatcatggccgacaagcagaagaacggcatcaaggtgaacttcaagatccgccacaacatcgaggacggcagcgtgcagctcgccgaccactaccagcagaacacccccatcggcgacggccccgtgctgctgcccgacaaccactacctgagcacccagtccgccctgagcaaagaccccaacgagaagcgcgatcacatggtcctgctggagttcgtgaccgccgccgggatcactctcggcatggacgagctgtacaaggtgacagggggaatggcaagcaagtgggatcagaagggtatggacattgcctatgaggaggcggccttaggttacaaagagggtggtgttcctattggcggatgtcttatcaataacaaagacggaagtgttctcggtcgtggtcacaacatgagatttcaaaagggatccgccacactacatggtgagatctccactttggaaaactgtgggagattagagggcaaagtgtacaaagataccactttgtatacgacgctgtctccatgcgacatgtgtacaggtgccatcatcatgtatggtattccacgctgtgttgtcggtgagaacgttaatttcaaaagtaagggcgagaaatatttacaaactagaggtcacgaggttgttgttgttgacgatgagaggtgtaaaaagatcatgaaacaatttatcgatgaaagacctcaggattggtttgaagatattggtgaggcttcggaaccatttaagaacgtctacttgctacctcaaacaaaccaattgctgggtttgtacaccatcatcagaaataagaatacaactagacctgatttcattttctactccgatagaatcatcagattgttggttgaagaaggtttgaaccatctacctgtgcaaaagcaaattgtggaaactgacaccaacgaaaacttcgaaggtgtctcattcatgggtaaaatctgtggtgtttccattgtcagagctggtgaatcgatggagcaaggattaagagactgttgtaggtctgtgcgtatcggtaaaattttaattcaaagggacgaggagactgctttaccaaagttattctacgaaaaattaccagaggatatatctgaaaggtatgtcttcctattagacccaatgctggccaccggtggtagtgctatcatggctacagaagtcttgattaagagaggtgttaagccagagagaatttacttcttaaacctaatctgtagtaaggaagggattgaaaaataccatgccgccttcccagaggtcagaattgttactggtgccctcgacagaggtctagatgaaaacaagtatctagttccagggttgggtgactttggtgacagatactactgtgtttaaacgcgtggtacccgggatcccgaattctgtgagcgtatggcaaacgaaggaaaaatagttatagtagccgcactcgatgggacatttcaacgtaaaccgtttaataatattttgaatcttattccattatctgaaatggtggtaaaactaactgctgtgtgtatgaaatgctttaaggaggcttccttttctaaacgattgggtgaggaaaccgagatagagataataggaggtaatgatatgtatcaatcggtgtgtagaaagtgttacatcgactcataatattatattttttatctaaaaaactaaaaataaacattgattaaattttaatataatacttaaaaatggatgttgtgtcgttagataaaccgtttatgtattttgaggaaattgataatgagttagattacgaaccagaaagtgcaaatgaggtcgcaaaaaaactaccgtatcaaggacagttaaaactattactaggagaattattttttcttagtaagttacagcgacacggtatattagatggtgccaccgtagtgtatataggatctgctcccggtacacatatacgttatttgagagatcatttctataatttaggagtgatcatcaaatggatgctaattgacggccgccatcatgatcctattttaaatggattgcgtgatgtgactctagtgactcggttcgttgatgaggaatatctacgatccatcaaaaaacaactgcatccttctaagattattttaatttctgatgtgagatccaaacgaggaggaaatgaacctagtacggcggatttactaagtaattacgctctacaaaatgtcatgattagtattttaaaccccgtggcatctagtcttaaatggagatgcccgtttccagatcaatggatcaaggacttttatatcccacacggtaataaaatgttacaaccttttgctccttcatattcagctgaaatgagattattaagtatttataccggtgagaacatgagactgactcgagttaccaaattagacgctgtaaattatgaaaaaaagatgtactaccttaataagatcgtccgtaacaaagtagttgttaactttgattatcctaatcaggaatatgactattttcacatgtactttatgctgaggaccgtgtactgcaataaaacatttcctactactaaagcaaaggtactatttctacaacaatctatatttcgtttcttaaatattccaacaacatcaactgaaaaagttagtcatgaaccaatacaacgtaaagtatctagcaaagattttatgtctaaaaacagaaatagcaagagatccgtacgcagtaataaatagaaacgtactactgagatatactaccgatatagagtataatgatttagttactttaataaccgttagacataaaattgattctatgaaaactgtgtttcaggtatttaacgaatcatctataaattatactccggttgatgatgattatggagaaccaatcattataacatcgtatcttcaaaaaggtcataacaagtttcctgtaaattttctatacatagatgtggtaatatctgacttatttcctagctttgttagactagatactacagaaactaatatagttaatagtgtactacaaacaggcgatggtaaaaagactcttcgtcttcccaaaatgttagagacggaaatagttgtcaagattctctatcgtcctaatataccattaaaaattgttagatttttccgcaataacatggtaactggagtagagatagcagatagatctgttatttcagtcgctgattaatcaattaatagagatgagataagaacattataataatcaataatatatcttatatcttgtttagaaaaatgccaatattaaaatagctaacgctagtaatccaatcggaagccatttgatatctataatagggtatctaatttcctgattcagatagcggacagctatattctcggtagctactcgtttggaatcacaaacattatttacatctaatttactatctgtaatggaaacgtttcccaatgaaatggtacaatccgatacattgcatcttgatatatttttttttaaagaggctggtaacaacgcatcgcttcgtttacatggctcgtaccaacaataatagggtaatcttgtatctattcctatccgtactatgcttttatcaggatgaatacatttacatcgtatatcgtctttgttagcatcgcagaatgcataaatttgctcgtccgtcatgataaaaatttaaagtgtaaatataactattatttttatagttgtaataaaaagggaaatttgattgtataccttcggttctttaaaagaaactgacttgataaaaatggctgtaatctctaaggttacgtatagtctatatgatcaaaaagagattaatgctacagatattatcattagtcatgttaaaaatgacgacgatatcggtaccgttaaagatggtagactaggtgctatggatggggcattatgtaaaacttgtgggaaaacggaattggaatgtttcggtcactggggtaaagtaagtatttataaaactcatatagttaagcctgaatttatttcagaaattattcgtttactgaattatatatgtattcactgcggattattgcgttcacgagaaccgtattccgacgatattaacctaaaagagttatcgggacacgctcttaggagattaaaggataaaatattatccaagaaaaagtcatgttggaacagtgaatgtatgcaaccgtatcaaaaaattactttttcaaagaaaaaggtttgtttcgtcaacaagttggatgatattaacgttcctaattctctcatctatcaaaagttaatttctattcatgaaaagttttggccattattagaaattcatcaatatccagctaacttattttatacagactactttcccatccctccgttgattattagaccggctattagtttttggatagatagtatacccaaagaaaccaatgaattaacttacttattaggtatgatcgttaagaattgtaacttgaatgctgatgaacaggttatccagaaggcggtaatagaatacgatgatattaaaattatttctaataacactaccagtatcaatttatcatatatcacatccggcaaaaataatatgattagaagttatatcgtcgcccggcgaaaagatcagaccgctagatctgtaattggtcccagtacatctatcaccgttaatgaggtaggaatgcccgcatatattagaaatacacttacagaaaagatatttgttaatgcctttacagtggataaagttaaacaactattagcatcaaaccaagttaaattttactttaataaacgattaaaccaattaacaagaatacgccaaggaaagtttatcaaaaataaaatacatttattgcctggtgattgggtagaagtagctgttcaagaatatacaagtattatttttggaagacagccgtctctacatagatacaacgtcatcgcttcatctatcagagctaccgaaggagatactatcaaaatatctcccggaattgccaactctcaaaatgctgatttcgacggggatgaggaatggatgatattagaacaaaatcctaaagctgtaattgaacaaagtattcttatgtatccgacgacgttactcaaacacgatattcatggagcccctgtttatggatctattcaagatgaaatcgtagcagcgtattcattgtttaggatacaagatctttgtttagatgaagtattgaacatcttggggaaatatggaagagagttcgatcctaaaggtaaatgtaaattcagcggtaaagatatctatacttacttgataggtgaaaagattaattatccgggtctcttaaaggatggtgaaattattgcaaacgacgtagatagtaattttgttgtggctatgaggcatctgtcattggctggactcttatccgatcataagtcgaacgtggaaggtatcaactttattatcaagtcatcttatgtttttaagagatatctatctatttacggttttggggtgacattcaaagatctgagaccaaattcgacgttcactaataaattggaggccatcaacgtagaaaaaatagaacttatcaaagaagcatacgccaaatatctcaaagatgtaagagacgggaaaatagttccattatctaaagctttagaggcggactacgtggaatccatgttatccaacttgacaaatcttaatatccgagagatagaagaacatatgagacaaacgctgatagatgatccagataataacctcctgaaaatggccaaagcgggttataaagtaaatcccacagaactaatgtatattctaggtacttatggacaacagaggattgatggtgaaccagcagagactcgagtattgggtagagtcttaccttactatcttccagactctaaggatccagaaggaagaggttatattcttaattctttaacaaaaggattaacaggttctcaatattacttttcgatgctggttgcaagatctcaatctactgatatcgtctgtgaaacatcacgtaccggaacactggctagaaaaatcattaaaaagatggaggatatggtggtcgacggatacggacaagtagttataggtaatacgctcatcaagtacgccgccaattataccaaaattctaggctcagtatgtaaacctgtagatcttatctatccagatgagtccatgacttggtatttggaaattagtgctctgtggaataaaataaaacagggattcgtttactctcagaaacagaaacttgcaaaaaagacattggcgccgtttaatttcctagtattcgtcaaacccaccactgaggataatgctattaaggttaaggatctgtacgatatgattcataacgtcattgatgatgtgagagagaaatacttctttacggtatctaatatagattttatggagtatatattcttgacgcatcttaatccttctagaattagaattacaaaagaaacggctatcactatctttgaaaagttctatgaaaaactcaattatactctaggtggtggaactcctattggaattatttctgcacaggtattgtctgagaagtttacacaacaagccctgtccagttttcacactactgaaaaaagtggtgccgtcaaacaaaaacttggtttcaacgagtttaataacttgactaatttgagtaagaataagaccgaaattatcactctggtatccgatgatatctctaaacttcaatctgttaagattaatttcgaatttgtatgtttgggagaattaaatccaaacatcactcttcgaaaagaaacagataaatatgtagtagatataatagttaatagattatacatcaagagagcagaaataaccgaattagttgtcgaatatatgattgaacgatttatctcctttagcgtcattgtaaaggaatggggtatggagacattcattgaggacgaggataatattagatttactgtctatctaaatttcgttgaaccagaggaattgaatcttagtaagtttatgatggttcttccgggggcagccaacaagggaaagattagtaaattcaagattcctatctctgactatacgggatatgacgacttcaatcaaacaaaaaagctcaataagatgactgtagaactcatgaatctaaaagaattaggttctttcgatttggaaaacgtcaacgtgtatcctggagtatggaatacatacgatatcttcggtatcgaggccgctcgtgaatacttgtgcgaagccatgttaaacacctatggagaagggttcgattatctgtatcagccttgtgatcttctcgctagtttactatgtgctagttacgaaccagaatcagtgaataaattcaagttcggcgcagctagtactcttaagagagctacgttcggagacaataaagcattgttaaacgcggctcttcataaaaagtcagaacctattaacgataatagtagctgccacttttttagcaaggtccctaatataggaactggatattacaaatactttatcgacttgggtcttctcatgagaatggaaaggaaactatctgataagatatcttctcaaaagatcaaggaaatggaagaaacagaagacttttaattcttatcaataacatatttttctatgatctgtcttttaaacgatggattttccacaaatgcgcctctcaagtccctcatagaatgatacacgtataaaaaatatagcataggcaatgactccttatttttagacattagatatgccaaaatcatagccccgcttctatttactcccgcagcacaatgaaccaacacgggctcgtttcgttgatcacatttagataaaaaggcggttacgtcgtcaaaatatttactaatatcggtagttgtatcatctaccaacggtatatgaataatattaatattagagttaggtaatgtatatttatccatcgtcaaatttaaaacatatttgaacttaacttcagatgatggtgcatccatagcatttttataatttcccaaatacacattattggttacccttgtcattatagtgggagatttggctctgtgcatatctccagttgaacgtagtagtaagtatttatacaaacttttcttatccatttataacgtacaaatggataaaactactttatcggtaaacgcgtgtaatttagaatacgttagagaaaaggctatagtaggcgtacaagcagccaaaacatcaacacttatattctttgttattatattggcaattagtgcgctattactctggtttcagacgtctgataatccagtctttaatgaattaacgagatatatgcgaattaaaaatacggttaacgattggaaatcattaacggatagcaaaacaaaattagaaagtgatagaggtagacttctagccgctggtaaggatgatatattcgaattcaaatgtgtggatttcggcgcctattttatagctatgcgattggataagaaaacatatctgccgcaagctattaggcgaggtactggagacgcgtggatggttaaaaaggcggcaaaggtcgatccatctgctcaacaattttgtcagtatttgataaaacacaagtctaataatgttattacttgtggtaatgagatgttaaatgaattaggttatagcggttattttatgtcaccgcattggtgttccgattttagtaatatggaatagtgttagataaatgcggtaacgaatgttcctgtaaggaaccataacagcttagatttaacgttaaagatgagcataaacataataaacaaaattacaatcaaacctataacattaatatcaaacaatccaaaaaatgaaatcagtggagtagtaaacgcgtacataactcctggataacgtttagcagctgccgttcctattctagaccaaaaattcggtttcatgttttcgaagcggtgttctgcaacaagtcggggatcgtgttctacatatttggcggcgttatccagtatctgcctattgatcttcatttcgttttcgattctggctatttcaaaataaaatcccgatgatagacctccagactttataatttcatctacaatgttcagcgccgtagtaactctaataatataggctgataagctaacatcataccctcctgtatatgtgaatatggcatgatttttgtccattacaagctcggttttaactttattgcctgtaataatttctctcatctgtaggatatctatttttttgtcatgcattgccttcaagacgggacgaagaaacgtaatatcctcaataacgttatcgttttctacaataactacatattctacctttttattttctaactcggtaaaaaaattagaatcccatagggctaaatgtctagcgatatttcttttcgtttcctctgtacacatagtgttacaaaaccctgaaaagaagtgagtatacttgtcatcatttctaatgtttcctccagtccactgtataaacgcataatccttgtaatgatctggatcatccttgactaccacaacatctcttttttctggcataacttcgttgtcctttacatcatcgaacttctgatcattaatatgctcatgaacattaggaaatgtttctgatggaggtctatcaataactggcacaacaataacaggagttttcaccgccgccatttagttattgaaattaatcatatacaactctttaatacgagttatattttcgtctatccattgtttcacatttacatatttcgacaaaaagatataaaatgcgtattccaatgcttctctgtttaatgaattactaaaatatacaaacacgtcactgtctggcaataaatgatatcttagaatattgtaacaatttattttgtattgcacatgttcgtgatctatgagttcttcttcgaatggcataggatctccgaatctgaaaacgtataaataggagttagaataataatatttgagagtattggtaatatataaactctttagcggtataattagtttttttctctcaatttctatttttagatgtgatggaaaaatgactaattttgtagcattagtatcatgaactctaatcaaaatcttaatatcttcgtcacacgttagctctttgaagtttttaagagatgcatcagttggttctacagatggagtaggtgcaacaattttttgttctacacatgtatgtactggagccattgttttaactataatggtgcttgtatcgaaaaactttaatgcagatagcggaagctcttcgccgcgactttctacatcgtaattgggttctaacgccgatctctgaatggatactagttttctaagttctaatgtgattctctgaaaatgtaaatccaattcctccggcattatagatgtgtatacatcggtaaataaaactatagtatccaacgatcccttctcgcaaattctagtcttaaccaaaaaatcgtatataaccacggagatggcgtatttaagagtggattcttctaccgttttgttcttggatttcatataagaaactataaagtccgcactactgttaagaatgattactaacgcaactatatagtttaaattaagcatcttggaaacataaaataactctgtagacgatacttgactttcgaataagtttgcagacaaacgaagaaagaacagacctctcttaatttcagaagaaaactttttttcgtattcctgacgtctagagtttatatcaataagaaagttaagaattagtcggttaatgttgtatttcattacccaagtttgagatttcataatattatcaaaagacatgataatattaaagataaagcgctgactatgaacgaaatagctatatggttcgctcaaaaatatagtcttgttaaacgtggaaacgataactgtatttttaatcacgtcagcggcatctaaattaaatataggtatatttattccacacactctacaatatgccacaccatcttcataataaataaattcgttagcaaagttattaattttagtgaaatagttagcgtcaactttcatagcttccttcaatctaatttgatgctcacacggtgcgaattccactctaacatcccttttccatgcctcaggttcatcgatctctataatatctagttttttgcgtttcacaaacacaggctcgtctctcgcgatgagatctgtatagtaactatgtaaatgataactagatagaaagatgtagctatatagatgacgatcctttaagagaggtataataactttaccccaatcagatagactgttgttatggtcttcggaaaaagaatttttataaatttttccagtattttccaaatatacgtacttgacatctaaaaaatccttaatgataataggaatggataatccgtctattttataaagaaatacatatcgcacattatacttttttttggaaatgggaataccgatgtgtctacataaatatgcaaagtctaaatattttttagagaatcttaattggtccaaattcttttccaagtacggtaatagatttttcatattgaacggtatcttcttaatctctggttctagttccgcattaaatgatgaaactaagtcactatttttataactaacgattacatcacctctaacatcatcatttaccagaatactgatcttcttttgtcgtaaatacatgtctaatgtgttaaaaaaaagatcatacaagttatacgtcatttcatctgtggtattcttgtcattgaaggataaactcgtactaatctcttctttaacagcctgttcaaatttatatcctatatacgaaaaaatagcaaccagtgtttgatcatccgcgtcaatattctgttctatcgtagtgtataacaatcgtatatcttcttctgtgatagtcgatacgttataaaggttgataacgaaaatatttttatttcgtgaaataaagtcatcgtaggattttggacttatattcgcgtctagtagatatgcttttatttttggaatgatctcaattagaatagtctctttagagtccatttaaagttacaaacaactaggaaattggtttatgatgtataatttttttagtttttatagattctttattctatacttaaaaaatgaaaataaatacaaaggttcttgagggttgtgttaaattgaaagcgagaaataatcataaattatttcattatcgcgatatccgttaagtttgtatcgtaatggcgtggtcaattacaaataaagcggatactagtagcttcacaaagatggctgaaatcagagctcatctaaaaaatagcgctgaaaataaagataaaaacgaggatattttcccggaagatgtaataattccatctactaagcccaaaaccaaacgagccactactcctcgtaaaccagcggctactaaaagatcaaccaaaaaggaggaagtggaagaagaagtagttatagaggaatatcatcaaacaactgaaaaaaattctccatctcctggagtcagcgacattgtagaaagcgtggccgctgtagagctcgatgatagcgacggggatgatgaacctatggtacaagttgaagctggtaaagtaaatcatagtgctagaagcgatctttctgacctaaaggtggctaccgacaatatcgttaaagatcttaagaaaattattactagaatctctgcagtatcgacggttctagaggatgttcaagcagctggtatctctagacaatttacttctatgactaaagctattacaacactatctgatctagtcaccgagggaaaatctaaagttgttcgtaaaaaagttaaaacttgtaagaagtaaatgcgtgcacttttttataaagatggtaaactctttaccgataataattttttaaatcctgtatcagacgataatccagcgtatgaggttttgcaacatgttaaaattcctactcatttaacagatgtagtagtatatgaacaaacgtgggaggaggcgttaactagattaatttttgtgggaagcgattcaaaaggacgtagacaatacttttacggaaaaatgcatgtacagaatcgcaacgctaaaagagatcgtatttttgttagagtatataacgttatgaaacgaattaattgttttataaacaaaaatataaagaaatcgtccacagattccaattatcagttggcggtttttatgttaatggaaactatgttttttattagatttggtaaaatgaaatatcttaaggagaatgaaacagtagggttattaacactaaaaaataaacacatagaaataagtcccgatgaaatagttatcaagtttgtaggaaaggacaaagtttcacatgaatttgttgttcataagtctaatagactatataaaccgctattgaaactgacggatgattctagtcccgaagaatttctgttcaacaaactaagtgaacgaaaggtatacgaatgtatcaaacagtttggtattagaatcaaggatctccgaacgtatggagtcaattatacgtttttatataatttttggacaaatgtaaagtccatatctcctcttccatcaccaaaaaagttaatagcgttaactatcaaacaaactgctgaagtggtaggtcatactccatcaatttcaaaaagagcttacatggcaacgactattttagaaatggtaaaggataaaaattttttagatgtagtatctaaaactacgttcgatgaattcctatctatagtcgtagatcacgttaaatcatctacggatggatgatatagatctttacacaaataattacaagaccgataaatggaaatggataagcgtatgaaatctctcgcaatgaccgctttctttggggagctaagcacattagatattatggcattgataatgtctatatttaaacgccatccaaacaataccattttttcagtggataaggatggtcagtttatgattgatttcgaatacgataattataaggcttctcaatatttggatctgaccctcactccgatatttggagatgaatgcaagactcacgcatcgagtatagccgaacaattggcgtgtgcggatattattaaagaggatattagcgaatacatcaaaactactccccgtcttaaacgatttataaaaaaataccgcaatagatcagatactcgcatcagtcgagatacagaaaagcttaaaatagctctagctaaaggcatagattacgaatatataaaagacgcttgttaataagtaaatgaaaaaaaactagtcgtttataataaaacacaatatggatgccaacatagtatcatcttctactattgcaacgtatatagacgctttagcgaagaatgcttcagaattagaacagaggtctaccgcatacgaaataaataatgaattggaactagtatttattaagccgccattaattactttgacaaatgtagtgaatatctctacgattcaggaatcgtttattcgatttaccgttactaataaggaaggtgttaaaattagaactaagattccattatctaaggtacatggtctagatgtaaaaaatgtacagttagtagatgctatagataacatagtttgggaaaagaaatcattagtgacggaaaatcgtcttcacaaagaatgcttgttgagactatcgacagaggaacgtcatatatttttggattacaagaaatatggatcctctatccgactagaattagtcaatcttattcaagcaaaaacaaaaaactttacgatagactttaagctaaaatattttctaggatccggtgcccaatctaaaagttctttgttgcacgctattaatcatccaaagtcaaggcctaatacatctctggaaatagaattcacacctagagacaatgaaaaagttccatatgatgaactaataaaggaattgacgactctatcacgtcatatatttatggcttctccagagaatgtaattctttctccgcctattaacgcacctataaagacttttatgttgcctaaacaagatatagtaggtctggatctggaaaatctatatgccgtaactaagactgacggcattcctataactatcagagttacatcaaacgggttgtattgttattttacacatcttggttatattattagatatcctgttaagagaataatagattccgaagtagtagtctttggtgaggcagttaaggataagaactggaccgtatatctcattaagctaatagagcctgtgaatgcaatcaatgatagactagaagaaagtaagtatgttgaatctaaactagtggatatttgtgatcggatagtattcaagtcaaagaaatatgaaggtccgtttactacaactagtgaagtcgtcgatatgttatctacatatttaccaaagcaaccagaaggtgttattctgttctattcaaagggacctaaatctaacattgattttaaaattaaaaaggaaaatactatagaccaaactgcaaatgtagtatttaggtacatgtccagtgaaccaattatctttggagaatcgtctatctttgtagagtataagaaatttagcaacgataaaggctttcctaaagaatatggttctggtaagattgtgttatataacggcgttaattatctaaataatatctattgtttggaatatattaatacacataatgaagtgggtattaagtccgtggttgtacctattaagtttatagcagaattcttagttaatggagaaatacttaaacctagaattgataaaaccatgaaatatattaactcagaagattattatggaaatcaacataatatcatagttgaacatttaagagatcaaagcatcaaaataggagatatctttaacgaggataaactatcggatgtgggacatcaatacgccaataatgataaatttagattaaatccagaagttagttattttacgaataaacgaactagaggaccgttgggaattttatcaaactacgtcaagactcttcttatttctatgtattgttccaaaacatttttagacgattccaacaaacgaaaggtattggcgattgattttggaaacggtgcggacctggaaaaatacttttatggagagattgcgttattggtagcgacggatccggatgctgatgctatagctagaggaaatgaaagatacaacaaattaaactctggaattaaaaccaagtactacaaatttgactacattcaggaaactattcgatccgatacatttgtctctagtgtcagagaagtattctattttggaaagtttaatatcatcgactggcagtttgctatccattattcttttcatccgagacattatgctaccgtcatgaataacttatccgaactaactgcttctggaggcaaggtattaatcactaccatggacggagacaaattatcaaaattaacagataaaaagacttttataattcataagaatttacctagtagcgaaaactatatgtctgtagaaaaaatagctgatgatagaatagtggtatataatccatcaacaatgtctactccaatgactgaatacattatcaaaaagaacgatatagtcagagtgtttaacgaatacggatttgttcttgtagataacgttgatttcgctacaattatagaacgaagtaaaaagtttattaatggcgcatctacaatggaagatagaccgtctacaaaaaactttttcgaactaaatagaggagccattaaatgtgaaggtttagatgtcgaagacttacttagttactatgttgtttatgtcttttctaagcggtaaataataatatggtatgggttctgatatccccgttctaaatgcattaaataattccaatagagcgatttttgttcctataggaccttccaactgtggatactctgtattgttaatagatatattaatacttttgtcgggtaacagaggttctacgtcttctaaaaataaaagtttgataacatctggcctgttcataaataaaaacttggcgattctatatatactcttattatcaaatctagccattgtcttatagatgtgagctactgtaggtgtaccatttgattttctttctaatactatatatttctctcgaagaagttcttgcacatcatctgggaataaaatactactgttgagtaaatcagttattttttttatatcgatattgatggacatttttatagttaaggataataagtatcccaaagtcgataacgacgataacgaagtatttatacttttaggaaatcacaatgactttatcagatcaaaattaacaaaattaaaggagcatgtatttttttctgaatatattgtgactccagatacatatggatctttatgcgtcgaattaaatgggtctagttttcagcacggtggtagatatatagaggtggaggaatttatagatgctggaagacaagttagatggtgttctacatccaatcatatatctgaagatatgcacactgataaatttgtcatttatgatatttatacgtttgattcgttcaagaataaacgattggtatttgtacaggtgcctccatcattaggagatgatagctatttgactaatccgttattgtctccgtattatcgtaattcagtagccagacaaatggtcaatgatatgatttttaatcaagattcatttttaaaatatttattagaacatctgattagaagccactatagagtttctaaacatataacaatagttagatacaaggataccgaagaattaaatctaacgagaatatgttataatagagataagtttaaggcgtttgtattcgcttggtttaacggcgttttggaaaatgaaaaggtactagatacgtataaaaaggtatctaatttgatataatgaattcagtgactgtatcacacgcgccatatactattacttatcacgatgattggaaaccagtaatgagtcaattggtagagttttataacgaagtagccagttggctgctacgagacgagacgtcgcctattcctgataagttctttatacagttgaaacaaccgcttagaaataaacgagtatgtgtgtgcggtatagatccgtatccgaaagatggaactggtgtaccgttcgaatcaccaaattttacaaaaaaatcaattaaggagatagcttcatctatatctagattaaccggagtaattgattataaaggttataaccttaatataatagacggggttataccctggaattattacttaagttgtaaattaggagaaacaaaaagtcacgcgatctactgggataagatttccaagttactgctgcagcatataactaaacacgttagtgttctttattgtttgggtaaaacagatttctcgaatatacgggccaagttagaatccccggtaactaccatagtcggatatcatccagcggctagagaccgccaattcgagaaagatagatcatttgaaattatcaacgttttactggaattagacaacaaggcacctataaattgggctcaagggtttatttattaatgctttagtgaaattttaacttgtgttctaaatggatgcaactattagaggtaatgatgttatctttgttcttaagactataggtgtcccgtcagcgtgcagacaaaatgaagatccaagatttgtagaagcatttaaatgcgacgagttagaaagatatattgagaataatccagaatgtacactattcgaaagtcttagggatgaggaagcatactctatagtcagaattttcatggatgtagatttagacgcgtgtctagacgaaatagattatttaacggctattcaagattttattatcgaggtgtcaaactgtgtagctagattcgcgtttacagaatgcggtgccattcatgaaaatgtaataaaatccatgagatctaatttttcattgactaagtctacaaatagagataaaacaagttttcatattatctttttagacacgtataccactatggatacattgatagctatgaaacgaacactattagaattaagtagatcatctgaaaatccactaaccagatcgatagacactgccgtatataggagaaaaacaactcttcgggttgtaggtactaggaaaaatccaaattgcgacactattcatgtaatgcaaccaccgcatgataatatagaagattacctattcacttacgtggatatgaacaacaatagttattacttttctctacaacgacgattggaggatttagttcctgataagttatgggaaccagggtttatttcattcgaagacgctataaaaagagtttcaaaaatattcattaattctataataaactttaatgatctcgatgaaaataattttacaacggtaccactggtcatagattacgtaacaccttgtgcattatgtaaaaaacgatcgcataaacatccgcatcaactatcgttggaaaatggtgctattagaatttacaaaactggtaatccacatagttgtaaagttaaaattgttccgttggatggtaataaactgtttaatattgcacaaagaattttagacactaactctgttttattaaccgaacgaggagaccatatagtttggattaataattcatggaaatttaacagcgaagaacccttgataacaaaactaattctgtcaataagacatcaactacctaaggaatattcaagcgaattactctgtccgaggaaacgaaagactgtagaagctaacatacgagacatgttaatagattcagtggagaccgatacctatccggataaacttccgtttaaaaatggtgtattggacctggtagacggaatgttttactctggagatgatgctaaaaaatatacgtgtactgtatcaaccggatttaaatttgacgatacaaagttcgtcgaagacagtccagaaatggaagagttaatgaatatcattaacgatatccaaccattaacggatgaaaataagaaaaatagagagttgtacgaaaaaactttatctagttgtttatgcggtgctaccaaaggatgtttaacattcttttttggagaaactgcaactggaaagtcgacaaccaaacgtttgttaaagtctgctatcggtgacctgtttgttgagacgggtcaaacaattttaacagatgtattggataaaggacctaatccatttatcgctaacatgcatttgaaaagatctgtattctgtagcgaactacctgattttgcctgtagtggatcaaagaaaattagatctgacaatattaaaaagttgacagaaccttgtgtcattggaagaccgtgtttctccaataaaattaataatagaaaccatgcgacaatcattatcgatactaattacaaacctgtctttgataggatagataacgcattaatgagaagaattgccgtcgtgcgattcagaacacacttttctcaaccttctggtagagaggctgctgaaaataatgacgcgtacgataaagtcaaactattagacgaggggttagatggtaaaatacaaaataatagatatagattcgcatttctatacttgttggtgaaatggtacaaaaaatatcatgttcctattatgaaactatatcctacaccggaagagattccggactttgcattctatctcaaaataggtactctgttagtatctagctctgtaaagcatattccattaatgacggacctctccaaaaagggatatatattgtacgataatgtggttactcttccgttgactactttccaacagaaaatatccaagtattttaattctagactatttggacacgatatagagagcttcatcaatagacataagaaatttgccaatgttagtgatgaatatctgcaatatatattcatagaggatatttcatctccgtaaatatatgctcatatatttatagaagatatcacatatctaaatgaataccggaatcatagatttatttgataatcatgttgatagtataccaactatattacctcatcagttagctactctagattatctagttagaactatcatagatgagaacagaagcgtgttattgttccatattatgggatcaggtaaaacaataatcgctttgttgttcgccttggtagcttccagatttaaaaaggtttacattctagtgcctaatattaacattttgaaaattttcaattataatatgggtgtagctatgaacttgtttaatgacaaattcatagctgagaatatctttattcattccacaacaagtttttattctcttaattataacgataacgtcattaattataacggattatctcgctacaataactctatttttatcgttgatgaggcacataatatctttgggaataatactggagaacttatgaccgtgataaaaaataaaaacaagattccttttttactattgtctggatctcccattactaacacacctaatactctgggtcatattatagatttaatgtccgaagagacgatagattttggtgaaattattagtcgtggtaagaaagtaattcagacacttcttaacgaacgcggtgtgaatgtacttaaggatttgcttaaaggaagaatatcatattacgaaatgcctgataaagatctaccaacgataagatatcacggacgtaagtttctagatactagagtagtatattgtcacatgtctaaacttcaagagagagattatatgattactagacgacagctatgttatcatgaaatgtttgataaaaatatgtataacgtgtcaatggcagtattgggacaacttaatctgatgaataatttagatactttatttcaggaacaggataaggaattgtacccaaatctgaaaataaataatggcgtgttatacggagaagaattggtaacgttaaacattagttccaaatttaaatactttattaatcggatacagacactcaacggaaaacattttatatacttttctaattctacatatggcggattggtaattaaatatatcatgctcagtaatggatattctgaatataatggttctcagggaactaatccacatatgataaacggcaaaccaaaaacatttgctatcgttactagtaaaatgaaatcgtctttagaggatctattagatgtgtataattctcctgaaaacgatgatggcagtcaattgatgtttttgttttcgtcaaacattatgtccgaatcctatactctgaaagaggtaaggcatatttggtttatgactatcccagatactttttctcaatacaaccaaattcttggacgatctattagaaaattctcttacgccgatatttctgaaccagttaatgtatatcttttagccgccgtatattccgatttcaatgacgaagtgacgtcattaaacgattacacacaggatgaattgattaatgttttaccatttgacatcaaaaagctgttgtatctaaaatttaagactaaagaaacgaatagaatatactctattcttcaagagatgtctgaaacgtattctcttccaccacatccatcaattgtaaaagttttattgggagaattggtcagacaatttttttataataattctcgtattaagtataacgataccaagttacttaaaatggttacatcagttataaaaaataaagaagacgctaggaattacatagatgatattgtaaacggtcacttctttgtatcgaataaagtatttgataaatctcttttatacaaatacgaaaacgatattattacagtaccgtttagactttcctacgaaccatttgtttggggagttaactttcgtaaagaatataacgtggtatcttctccataaaactgatgagatatataaagaaataaatgtcgagctttgttaccaatggataccttccagttacattggagccacacgagctgacgttagacataaaaactaatattaggaatgccgtatataagacgtatctccatagagaaattagtggtaaaatggccaagaaaatagaaattcgtgaagacgtggaattacctctcggcgaaatagttaataattctgtagttataaacgttccgtgtgtaataacctacgcgtattatcacgttggggatatagtcagaggaacattaaacatcgaagatgaatcaaatgtaactattcaatgtggagatttaatctgtaaactaagtagagattcgggtactgtatcatttagcgattcaaagtactgcttttttcgaaatggtaatgcgtatgacaatggcagcgaagtcactgccgttctaatggaggctcaacaaggtatcgaatctagttttgtttttctcgcgaatatcgttgactcataaaaaagagaatagcggtaagtataaacacgaatactatggcaataattgcgaatgttttattcccttcgatatatttttgataatatgaaaaacatgtctctctcaaatcggacaaccatctcataaaatagttctcgcgcgctggagaggtagttgctgctcgtataatctccccagaataatatacttgcgtgtcgtcgttcaatttatacggatttctatagttctctgttatataatgcggttttccatcatgattagacgacgacaatagtgttctaaatttagatagttgatcagaatgaatgtttattggcgttggaaaaattatccatacagcgtctgcagagtggttgatagttgttcctagatatgtaaaataatccaacttactaggcagcaaattgtctagataaaatactgaatcaaacggtgcagacgtattggtggatctaatggaatccaattgattaactatcttttgaaaatatacatttttatgatccgatacttgtaagaatatagaaataatgataagtccatcatcgtgtttttttgcctcttcataagaactatattttttcttattccaatgaacaagattaatctctccagagtatttgtacacatctatcaagtgattggatccataatcgtcttcctttccccaatatatacgtagtgatgataacacatattcattggggagaaaccctccacttatatatcctcctttaaaattaatccttactagttttccagtgttctggatagtggttggtttcgactcattataatgtatgtctaacggcttcaatcgcgcgttagaaattgcttttttagtttctatattaataggagatagttgttgcggcatagtaaaaatgaaatgataactgtttaaaaatagctcttagtatgggaattacaatggatgaggaagtgatatttgaaactcctagagaattaatatctattaaacgaataaaagatattccaagatcaaaagacacgcatgtgtttgctgcgtgtataacaagtgacggatatccgttaataggagctagaagaacttcattcgcattccaagcgatattatctcaacaaaattcagattctatctttagagtatccactaaactattacggtttatgtactacaatgaactaagagaaatctttagacggttgagaaaaggttctatcaacgatatcgatcctcactttgaagagttaatattattgggtggtaaactagataaaaaggaatctattaaagattgtttaagaagagaattaaaagaggaaagtgatgaacgtataacagtaaaagaatttggaaatgtaattctaaaacttacaacacgggataaattatttaataaagtatatataagttattgcatggcgtgttttattaatcaatcgttggaggatttatcgcatactagtatttacaatgtagaaattagaaagattaaatcattaaatgattgtattaacgacgataaatacgaatatctgtcttatatttataatatgctagttaatagtaaatgaacttttacagatctagtataattagtcagattattaagtataatagacgactagctaagtctattatttgcgaggatgactctcaaattattacactcacggcattcgttaaccaatgcctatggtgtcataaacgagtatccgtgtccgctattttattaactactgataacaaaatattagtatgtaacagacgagatagttttctctattctgaaataattagaactagaaacatgtctagaaagaaacgattatttctgaattattccaattatttgtccaaacaggaaagaagtatactatcgtcatttttttctctagatccagctactactgataatgatagaatagatgctatttatccgggtggcatacccaaaaggggtgagaatgttccagagtgtttatccagggaaattaaagaagaagttaatatagacaattcttttgtattcatagacactcggttttttattcatggcatcatagaagataccattattaataaattttttgaggtaatcttctttgtcggaagaatatctttaacgagtgatcaaatcattgatacatttaaaagtaatcatgaaatcaaggatctaatatttttagatccgaattcaggtaatggactccaatacgaaattgcaaaatatgctctagatactgcaaaactcaaatgttatggccatagaggatgttattacgaatcattaaaaaaattaactgaggatgattgattagaaaatataaattaatttaccatcgtgtatttttataacgggattgtccggcatatcatgtagatagttaccgtctacatcgtatactcgaccatctacgcctttaaatcctctatttattgacattaatctattagaattggaataccaaatattagtaccctcaattagtttattggtaatattttttttagacgatagatcgatggctcttgaaaccaaggttttccaaccggactcattgtcgatcggtgagaagtctttttcattagcatgaatccattctaatgatgtatgtttaaacactctaaacaattggacaaattcttttgatttgctttgaatgatttcaaataggtcttcgtctacagtaggcataccattagataatctagccattataaagtgcacgtttacatatctacgttctggaggagtaagaacgtgactattgagacgaatggctcttcctactatctgacgaagagacgcctcgttccatgtcatatctaaaatgaagatatcattaattgagaaaaaactaataccctcgcctccactagaagagaatacgcatgttttaatgcattctccgttagtgtttgattcttggttaaactcagccaccgccttgattctagtatcttttgttctagatgagaactctatattagagataccaaagactttgaaatatagtaataagatttctattcctgactgattaacaaatggttcaaagactagacatttaccatgggatgctaatattcccaaacatacatctataaatttgacgcttttctcttttaattcagtaaatagagagatatcagccgcactagcatcccctttcaatagttctccctttttaaaggtatctaatgcggatttagaaaactctctatctcttaatgaatttttaaaatcattatatagtgttgctatctcttgcgcgtattcgcccggatcacgattttgtctttcaggaaagctatcgaacgtaaacgtagtagccatacgtctcagaattctaaatgatgatatacctgtttttatttcagcgagtttagccttttgataaatttcttcttgctttttcgacatattaacgtatcgcattaatactgttttcttagcgaatgatgcagacccttctacgtcatcaaaaatagaaaactcgttattaactatgtacgaacataggcctcctagtttggagactaattctttctcatcaactagacgtttattctcaaatagcgattggtgttgtaaggatcctggtcgtagtaagttaaccaacatggtgaattcttgcacactattaacgataggtgtagccgataaacaaatcatcttatggttttttaatgcgatggtcttagataaaaaattatatactgaacgagtaggacggatcttaccatcttctttgattaatgatttagaaatgaagttatgacattcatcaataatgacgcatattctactcttggaattaatagttttgatattagtaaaaaatttatttctaaaattttgatcatcgtaattaataaaaatacaatccttcgttatctctggagcgtatctgagtatagtgttcatccaaggatcttctatcaaagcctttttcaccaataagataatagcccaattcgtataaatatccttaagatgtttgagaatatatacagtagtcattgttttaccaacacccgtttcatggaacaataaaagagaatgcatactgtctaatcctaagaaaactcttgctacaaaatgttgataatccttgaggcgtactacgtctgttcccatcatttcaacaggcatattagtagttctgcgcaatgcataatcgatataggccgcgtgtgatttactcatttatgagtgataagtaataactatgttttaaaaatcacagcagtagtttaactagtcttctctgatgtttgttttcgatactttttgaatcagaagtcatactagaataaagcaacgagtgaacgtaatagagagcttcgtatactctattcgaaaactctaagaacttattaatgaattccgtatccactggattgtttaaaatactaaattgaacactgttcacatccttccaagaagaagacttagtgacggacttaacatgagacataaataaatccaaattttttttacaaacatcactagccaccataatggcgctatctttcaaccagctatcgcttacgcattttagcagtctaacatttttaaagagactacaatatattctcatagtatcgattacacctctaccgaataaagttggaagtttaataatacaatatttttcgtttacaaaatcaaataatggtcgaaacacgtcgaaggttaacatcttataatcgctaatgtatagattgttttcagtgagatgattattagatttaatagcatctcgttcacgtttgaacagtttattgtgtgcgctgaggtcggcaactacggcgtccgctttagtactcctcccataatactttacgctattaatctttaaaatttcatagactttatctagatcgctttctggtaacatgatatcatgtgtaaaaagttttaacatgtcggtcggcattctatttagatcattaactctagaaatctgaagaaagtaattagctccgtattccagactaggtaatgggcttttacctaaagacaagttaagttctggcaatgtttcataaaatggaagaaggacatgcgttccctcccggatattttttacaatttcatccatttacaactctatagtttgttttcattattattagttattatctcccataatcttggtaatacttaccccttgatcgtaagataccttatacaggtcattacatacaactaccaattgtttttgtacataatagattggatggttgacatccatggtggaataaactactcgaacagatagtttatctttccccctagatacattggccgtaatagttgtcggcctaaagaatatctttggtgtaaagttaaaagttagggttcttgttccattattgctttttgtcagtagttcattataaattctcgagatgggtccgttctctgaatatagaacatcatttccaaatctaacttctagtctagaaataatatcggtcttattcttaaaatctattcccttgatgaagggatcgttaatgaacaaatccttggcctttgattcggctgatctattatctccgttatagacgttacgttgactagtccaaagacttacaggaatagatgtatcgatgatgttgatactatgtgatatgtgagcaaagattgttctcttagtggcatcactatatgttccagtaatggcggaaaactttttagaaatgttatatataaaagaattttttcgtgttccaaacattagcagattagtatgaagataaacactcatattatcaggaacattatcaatttttacatacacatcagcatcttgaatagaaacgataccatcttctggaacctcaacaatctcggcagactccggataaccagtcggtgggccatcactaacaataactagatcatccaacaatctactcacatatgcatctatataatctttttcatcttgtgagtaccctggatacgaaataaatttattatccgtatttccataataaggtttagtataaacagagagcgatgttgccgcatgaacttcagttacagtcgccgttggttggtttatttgacctattactctcctaggtttctctataaacgatggtttaatttgtacattcttaaccatatatccaataaagctcaattcaggaacataaacaaattctttgttgaacgtttcaaagtcgaacgaagagtcacgaataacgatatcggatactggattgaaggttaccgttacggtaatttttgaatcggatagtttaagactgctgaatgtatcttccacatcaaacggagttttaatataaacgtatactgtagatggttctttaatagtgtcattaggagttaggccaatagaaatatcattaagttcactagaatatccagagtgtttcaaagcaattgtattattgatacaattattatataattcttcgccctcaatttcccaaataacaccgttacacgaagagatagatacgtgattaatacatttatatccaacatatggtacgtaaccgaatcttcccatacctttaacttctggaagttccaaactcagaaccaaatgattaagcgcagtaatatactgatccctaatttcgaagctagcgatagcctgattgtctggaccatcgtttgtcataactccggatagagaaatatattgcggcatatacaaagttggaatttgactatcgactgcgaagacattagaccgtttaatagagtcatccccaccgatcaaagaattaatgatagtattattcattttctatttaaaatggaaaaagcttacaataaactccgtagagaaatatctataatttgtgagttttccttaaagtaacagcttccgtaaacgccgtctttatctcttagtaggtttattgtatttatgaccttttccttatcttcatagaatactaaaggcaacaaagaaatttttggttcttctctaagagctacgtgagacttaaccatagaagccaacgaatccctacatattttagaacagaaatacccaacttcaccacccttgaatgtctcaatactaataggtctaaaaaccaaatcttgattacaaaaccaacacttatcaattacactatttgtcttaatagacacatctgccatagatttataatactttggtagtatacaagcgagtgcttcttctttagcgggcttaaagactgctttaggtgctgaaataaccacatctggaaggcttactcgcttagccatttaattacggaactatttttttatacttctaatgagcaagtagaaaacctctcatctacaaaaacatactcgtgtccataatcctctaccatagttacacgttttttagatctcatatgtgctaaaaagttttcccatactaattggttactattatttttcgtataatttttaacagtttgaggttttagatttttagttacagaagtgatatcgaatattttatccaaaaagaatgaataattaattgtcttagaaggagtgttttcttggcaaaagaataccaagtgcttaaatatttctactacttcattaatcttttctgtactcagattcagtttctcatcttttacttgattgattatttcaaagactaacttataatcctttttatttattctctcgttagccttaagaaaactagatacaaaatttgcatctacatcatccgtggatatttgatttttttccatgatatccaagagttccgagataatttctccagaacattgatgagacaataatctccgcaatacatttctcaaatgaataagtttattagacacatggaagtttgactttttttgtacctttgtacatttttgaaatacagactcgcaaaaaatacaatattcatatccttgttcagatactataccgttgtgtctacaaccgctacataatcgtagattcatgttaacactctacgtatctcgtcgtccaatattttatataaaaacattttatttctagacgttgccagaaaatcctgtaatatttttagttttttgggctgtgaataaagtatcgccctaatatggttaccgtcctccgccaatatagtagttaaattatccgcacatgcagaagaacaccgcttaggcggattcagtacaatgttatatttttcgtaccaactcatttaaatatcataatctaaaatagttctgtaatatgtctagcgctaatatattgatcataatcctgtgcataaattaagatacaacaatgtctcgaaatcatcgacatggcttcttccatagttagaagatcgtcgtcaaagttagcaacgtgattcatcaacatttgctgttttgaggcagcaaatactgaaccgtcgccattcaaccattcataaaaaccatcgtctgaatccattgataatttcttgtactggtttttgagagctcgcatcaatctagcatttctagctcccggattgaaaacagaaagaggatcgtacatccagggtccattttctgtaaatagaatcgtataatgtcccttcaagaagatatcagacgatccacaatcaaagaattggtctccgagtttgtaacaaactgcggactttaacctatacatgataccgtttagcatgatttctggtgatacgtcaatcggagtatcatctattagagatctaaagccggtgtaacattctccaccaaacatattcttattctgacgtcgttctacataaaacatcattgctccattaacgataacaggggaatgaacagcactacccatcacattagttcccaatggatcaatgtgtgtaactccagaacatcttccatatcctatgttaggaggagcgaacaccactcttccactattgccatcgaatgccatagaataaatatccttggaattgatagaaatcggactgtcggatgttgtgatcatcttcataggattaacaactatgtatggtgccgcctgaagtttcatatcgtaactgatgccgtttataggtctagccacagaaaccaacgtaggtctaaatccaactatagacaaaatagaagccaatatctgttcttcatctgtcataacttgagagcatccagtatgaataatcttcattagatggggatctaccgcatcatcatcgttacaataaaaaattcccattctaatgttcataattgcttttctaatcatggtatgcatgtttgctctctgaatctctgtggaaattagatctgatacacctgtaatcactatcggattatcctccgtaagacgattaaccaacaacatataattataagactttacttttctaaattcataaagttgctggattaggctataggtgtctccatgtacatacgcgttctcgagcgcaggaagtttaataccgaatagtgccatcagaataggatgaatatagtaattagtttctggttttctataaataaaagacaaatcttgtgaactagacatatcggtaaaatgcatggattggaatcgtgtagtcgacagaagaatatgatgattagatggagagtatattttatctaactctttgagttggtcaccgattctaggactagctcgagaatgaataagtactaaaggatgagtacatttcacagaaacactagcattgttcaatgtgctctttacatgggtaaggagttgaaatagctcgtttctatttgttctgacaatatttagtttattcataatgttaagcatatcctgaatagtaaagttagatgtgtcatacttgttagtagttagatatttagcaattgcattcccatcatttctcaatctcgtactccaatcatgcgtggatgctacttcgtcgatggaaaccatacaatcctttttgataggctgttgagattgattatttcctgcacgtttaggtttggtacgttgatttctagcccctgcggatataaagtcatcgtctacaattttggataatgaattgcatacactacaagacaaagatttatcagaagtgtgaatatgatcttcatctaccaaagaaagagtttgattagtataactagattttagtcctgcgttagatgttaaaaaaacatcgctattgaccacggcttccattatttatattcgtagtttttactcgaaagcgtgattttaatattcaatcttattacttttggaatcgttcaaaacctttgactaattgtagaatttgatctattgccctacgcgtatactcccttgcatcatatacgttcgtcaccagatcgtttgtttcggcctgaagttggtgcatatctctttcaacattcgacatgagatccttaagggccatatcgtctagattttgttgagatgctgctcctggatttggattttgttgtgctgttgtacatactgtaccaccagtaggtgtaggagtacatacagtggccacaataggaggttgaggaggtgtaaccgttggagtagtacaagaaatacttccatccgattgttgtgtacatgtagttgttggtaacgtctgagaaggttgggtagatggcggtgtcgtcgtcttttgatctttattaaatttagagataatatcctgaacagcattgctcggcgtcaacgctggaaggagtgaactcgccggcgcatcagtatctgcagacagccaatcaaaaagattagacatatcagatgatgtattagtttgttgtcgtggttttggtgtaggagccggtgtagctgttggaaccggctgtggagttatatgaatagttggttgtagcggttggataggctgtctgctggcggccatcatattatctctagctagttgttctcgcaactgtctttgataatacgactcttgagactttagtcctatttcaatcgcttcatcctttttcgtatccggatccttttcttcagaataatagattgacgactttggtgtagaggattctgccagcccctgtgagaacttgttaaagaagtccatttaaggctttaaaattgaattgcgattataagattaaatggcagacacagacgatattatcgactatgaatccgatgatctcaccgaatacgaggatgatgaagaagaggaagaagatggagagtcactagaaactagtgatatagatcccaaatcttcttataagattgtagaatcagcatccactcatatagaagatgcgcattccaatcttaaacatatagggaatcatatatctgctcttaaacgacgctatactagacgtataagtctatttgaaatagcgggtataatagcagaaagctataacttgcttcaacgaggaagattacctctagtttcagaattttctgacgaaacgatgaagcaaaatatgctacatgtaattatacaagagatagaggagggttcttgtcctatagtcatcgaaaagaacggagaattgttgtcggtaaacgattttgacaaagatggtctaaaattccatctagactatattatcaaaatttggaaacttcaaaaacgatattagaatttatacgaatatcgttctctaaatgtcacaatcaagtctcgcatgttcagcaatttattgtcgtactttatatcgtgttcattaacgatatcttgcaaaatagtaatgattctatcttccttcgatagatattcttcagagattattgtcttatattctttcttgttatcagatatgaatttgataagactttgaacattattgatacccgtctgtttaattttttctacagatattttagttttggcagattctatcgtatctgtcaatagacatccaacatcgacattcgacgtcaattgtctataaatcaacgtataaattttagaaataacattagcgaattgttgtgcattgatgtcgttattctgaaacagtatgattttaggtagcattttcttaacaaagagaacgtatttattgttactcagttgaacagatgatatatccagattactaacgcatctgattccatataccaaactttcagaagaaatggtgtacaattgtttgtattcattcaatgtctctttttcagaaattagtttagagtcgaatactgcaataattttcaagagatagttttcatcagataagattttatttagtgtagatatgataaaactattgttttgttggagaacttgatacgccgcgttctctgtagtcgacgctctcaaatgggaaacaatctccattatttttttggaatcggatacaatatcttcggtatcttgacgcaatctagtatacatagagttaagagaaattagagtttgtacattaagcaacatgtctctaaatgtggctgcaaacttttccttttccacatcatctagtttattatataccgatttcacaacggcaccagatttaaggaaccagaatgaaaaactctgataactacaatatttcatcatagttacgattttatcatcttctatagttggtgtaatagcgcatacctttttctccaagactggaaccaacgtcataaaaatgtttaaatcaaaatccatatcaacatctgatgcgctaagaccagtctcgcgttcaagattatctttactaatggtgacgaactcatcgtatagaactctaagtttgtccattatttatttacagatttagttgtttaatttatttgtgctcttccagagttgggatagtatttttctaacgtcggtattatattattaggatctacgttcatatgtatcataatattaatcatccacgttttgataaatctatctttagcttctgaaataacgtatttaaacaaaggagaaaaatatttagctacggcatcagacgcaataacattttttgtaaatgtaacgtatttagacgacagatcttcgttaaaaagttttccatctatgtagaatccatcggttgttaacaccattcccgcgtcagattgaataggagtttgaatagtttgttttggaaatagatccttcaataacttatagttgggtgggaaaaaatcgattttatcactagactctttcttttttactatcattacctcatgaactatttcttgaatgagtatatgtattttctttcctatatcggacgcgttcattggaaaatataccatgtcgttaactataagaatatttttatcctcgtttacaaactgaataatatcagatgtagttcgtaaacgaactatatcatcaccagcacaacatctaactatatgatatccactagtttcctttagtcgtttattatcttgttccatattagcagtcattccatcatttaagaaggcgtcaaagataatagggagaaatgacattttggattctgttacaactttaccaaaattaaggatatacggacttactatctttttctcaacgtcgatttgatgaacacacgatgaaaatgtacttcgatgagattgatcatgtagaaaacaacaagggatacaatatttccacatatcatgaaatatattaagaaatcccaccttattatatttccccaaaggatccatgcatgtaaacattatgccgttatcattaataaagacttctttctcatcggatctgtaaaagttgttactgatttttttcattccaggatctagataattaataatgatgggttttctattcttattctttgtattttggcatatcctagaccagtaaacagtttccactttggtaaaatcagcagacttttgaacgctattaaacatggcattaatggcaataactaaaaatgtaaaatatttttctatgttaggaatatggtttttcactttaatagatatatggtttttggccaaaatgatagatatttttttatccgaggatagtaaaatattattagtcgccgtctctataaaaatgaagctagtctcgatatccaattttattctagaattgataggagtcgccaaatgtaccttatacgttatatctcccttgatgcgttccatttgtgtatctatatcggacacaagatctgtaaatagttttacgttattaatcatcacggtatcgccgtcgctagataacgctaatgtaccatccaagtcccaaatggagagatttaactgttcatcgtttagaataaaatgattaccggtcatattaataaagtgttcatcgtatctagataacaacgacttataattaatgtccaagtcttgaactcgctgaatgatcttttttaacccagttagttttagattggtacgaaatatattgttaaactttgattctacagtaatgtccaaatctagttgtggaaatacttccatcaacattgtttcaaacttgataatattattatctacatcttcatacgatccaaattccggaatagatgtatcgcacgctctggccacccagataaccaaaaagtcacacgctccaggatatacattgtataaaaagctatcgttttttagtagtgtttttttctgagtatatacgaagggattaaaaatagtattatcaacgtaactatattccaaattattcttatgagaatagataataatatcgtccttaatatctaacaaatttcctaaatatccctttaattgagtcattcgaagcgtcaatagaatatgtctcttaactatttccggctgttgtatatttaaatgacttcgtaaaaaataatatatgggcgacttctcatctatgtaatcatatggagtgagatatagggctcgttctacctcctgccccttacccacctgtaataccaattgcggacttactatatatcgcatatttatatcgtggggtaaagtgaaaatctactaccgatgatgtaagtcttacaatgttcgaaccagtaccagatcttaatttggaggcctccgtagaactaggggaggtaaatatagatcaaacaacacctatgataaaggaaaatagcggttttatatcccgtagtagacgtctattcgcccatagatctaaggatgatgagagaaaactagcactacgattctttttacaaagactttattttttagatcatagagagattcattatttgttcagatgcgttgacgctgtaaaagacgtcactattaccaaaaaaaataacattatcgtggcgccttatatagcacttttaactatcgcatcaaaaggatgcaaacttacagaaacaatgattgaagcattctttccagaactatataatgaacatagtaagaaatttaaattcaactctcaagtatccatcatccaagaaaaactcggataccagtttggaaactatcacgtttatgattttgaaccgtattactctacagtagctctggctattcgagatgaacattcatctggcatttttaatatccgtcaagagagttatctggtaagttcattatctgaaataacatatagattttatctaattaatctaaaatctgatcttgttcaatggagtgctagtacgggcgctgtaattaatcaaatggtaaatactgtattgattacagtgtatgaaaagttacaactggtcatagaaaatgattcacaatttacatgttcattggctgtggaatcaaaacttccaataaaattacttaaagatagaaatgaattatttacaaaattcatcaacgagttaaaaaagaccagttcattcaagataagcaaacgcgataaggatacgctactaaaatattttacttaggactggagttagaatttatagacgactcatttcgtttatcattattagtattcttcttgttatcttgttcagaaatatacagcaatgctatgcctaatactaaatacattatcatgcttgcaatggctctaacaacgacgaaccaaaatgaatttggtcgtagcttttgttcacaaaaatacataaagaaatgtctacataaatctatggcgccattggctacttgaaatagcgccagtcctcctacagattttaatatagctgtataacatgacatttattcatcatcaaaagagacagagtcaccatctgtcatatttagattttttttcatgtgttcaaagtatcctctactcatttcattataatagtttatcatacttagaattttaggacggatcaatgagtaagacttgactagatcgtcagtagtaatttgtgcatcgtctattctgcatccgcttcgtcgaataatgtatagcatcgctttgagattctccatagctatcaagtctttatacaatgacatggaaatatctgtgaatactttatacttctccaacatcgatgccttaacatcatcgcctactttagcattgaaaatacgttctattgtgtagatggatgtagcaagatttttaaacaacaatgccatcttacacgatgattgcctcaagtctccaatcgtttgtttagaacgattagctacagagtccaatgcttggctgactagcatattattatctttagaaattgtattcttcaatgaggcgtttatcatatctgtgatttcgttagtcatattacagtctgactgggttgtaatgttatccaacatatcacctatggatacggtacacgtaccagcatttgtaataatcctatctaagatgttgtatggcattgcgcagaaaatatcttctcctgtaatatttccactctcgataaatctactcagattattcttaaatgccttattctctggagaaaagatatcagtgtccatcatttcattaatagtatacgcagaaaagataccacgagtatcaattctatccaagatacttatcggttccgagtcacagataatggtttcctctccttcgggagatcctgcatagaaatatctaggacaatagtttctatactgtctgtaactctgataatctctaaagtcactaactgataccatgaaattgagaagatcaaacgctgaagtaattaatttttctgcctcgtttttactacaactagttttcatcaatgtagtgacgatgtattgtttagttacttttggtctaatactgatgatagagatattattacttcccataatggatcttctagtagtcaccttaaagcccattgatgcaaatagcagatagataaagtcttggtatgactcctttctaatatagtacggactacctttgtcacccaactttatacccacataagccataacaacctctttaatagccgtttcatgaggtttatcagccatgagcctgagtagttggaagaatctcatgaatcctgtctcagaaagtcctatatgcatgatagatttatctttcctgggaaactctcgtatagtcatagatgaaatactcttcaaagtttctgaaataagattagtaacagtcttacctccgactactctaggtaacaaacaaactctaataggtgttttctctgcggagataatatcagaaaggatagagcaataagtagtattattgtgattataaagaccgaatacataacaggtagaatttataaacatcatgtcctgaaggtttttagacttgtattcctcgtaatccataccgtcccaaaacatggatttggtaactttgatagccgtagatctttgttccttcgccaacaggttaaagaaattaataaagaatttgtggtttctacctatgtctacaaattgcacgtttggaagcgccacggttacattcactgcagcattttgaggatcgcgagtatgaagtacgatgttattgtttactggtatatctggaaagaattctaccagtctaggaataagagattgatatcgcatagaaatacaaaagttcataatctcatcatctaagagcattttgttaccattgtaataaatatccactctgtcatatgtataaatgaagtactgttcaaacatgatgagatgtttatatgttggcatagtagtgagatctacgtttggtaatggcaatgtattaagattaactccataatgtctagcagcatctgcgatgttataagcgttgtcaaagcggggtcgatcttgtgctgttatatattgtctaacacctataagattatcaaaatcttgtctgcttaatacaccgttaacaatttttgccttgaattcttttattggtgcattaataacatccttatagaggatgttaaacaaataagtgttatcaaagttaagatctggatatttcttttctgctagaacatccattgagtcggagccatctggtttaatataaccaccgataaatctagctctgtattctgtatccgtcaatctaatattaagaaggtgttgagtgaaaggtggaagatcgtaaaagctgtgagtattaatgataggattagtttccgaactaatgttaattggggtattaataatatctatatttccagcgttaagtgtaacattaaacagttttaattcacgtgacgtggtatcaattaaataattaatgcccaatttggatatagcagcctgaagctcatcttgtttagttacggatcctaatgagttattaagcaatatatcgaacggatgaacgaaggttgttttaagttggtcacatactttgtaatctagacatagatgcggaagaacggtagaaactatacgaaataaatattcagagtcctctaattgatcaagagtaactattgacttaataggcatcatttatttagtattaaatgacgaccgtaccagtgacggatatacaaaacgatttaattacagagttttcagaagataattatccatctaacaaaaattatgaaataactcttcgtcaaatgtctattctaactcacgttaacaacgtggtagatagagaacataatgccgccgtagtgtcatctccagaggaaatatcctcacaacttaatgaagatctatttccagatgatgattctccggccactattatcgaacgagtacaacctcatactactattattgacgatactccacctcctacgtttcgtagagagttattgatatcggaacaacgtcaacaacgagaaaaaagatttaatattacagtatcgaaaaatgctgaagcaataatggaatctagatctatgatatcttctatgccaacacaaacaccatccttgggagtagtttatgataaagataaaagaattcagatgttggaggatgaagtggttaatcttagaaatcaacgatctaatacaaaatcatctgataatttagataattttaccagaatactatttggtaagactccgtataaatcaacagaagttaataagcgtatagccatcgttaattatgcaaatttgaacgggtctcccttatcagtcgaggacttggatgtttgttcagaggatgaaatagatagaatctataaaacgattaaacaatatcacgaaagtagaaaacgaaaaattatcgtcactaacgtgattattattgtcataaatattatcgagcaagcattgctaaaactcggatttgaagaaatcaaaggactgagtaccgatatcacttcagaaattatcgatgtggagatcggagatgactgcgatgctgtagcatcaaaactaggaatcggtaacagtccggttcttaatattgtattgtttatactcaagatattcgttaaacgaattaaaattatttaatttaatacattcccatatccagacaacaatcgtctggattaatctgttcctgtcgtctcataccggacgacatattaatctttttattagtaggcatctttttagatggtttctttttcccagcattaactgagtcgatacctagaagatcgtgattgatctctccgaccattccacgaacttctaattggccgtctctgacggtaccataaactattttaccagcattagtaacagcttggacaatctgaccatccattgcgttgaatgatgtagttgctgttgttctacgtttaggagcaccagaagtatttttggagcccttggatgttgatgtagaagaagacgaggattttgattttggtttacatgtaatacattttgaactctttgattttgtatcacatgcgccggcagtcacatctgtttgagaattaagattattgttgcctcctttgacggctgcatctccaccgatttgcgctagtagatttttaagctgtggtgtaatcttattaactgtttcgatataatcatcgtaactgcttctaacggctaaattttttttatccgccatttagaagctaaaaatatttttatttatgcagaagatttaactagattatacaatgaactaatatgatccttttccagattatttacaaacttggtatttcttggttctggaggaggcgaatttaaattcggacttggattcggattttgtgagttcttgatcttattatacagcgcatataggatggcgacggtaactgctacgcaaataccgatcaacaaaagaataccaatcatttattgacaataacttcactattgatcaagtatgcaatatatcatcttttcactaaataagtagtaataatgattcaacaatgtcgagatatatggacgataataacttagttcacggaaatatcgctatgattggtgtgaatgactccgctaactctgtggggcgcgcagtgctttccccacatagaataaattagcattccgactgtgataataataccaagtataaacgccataatactcaatactttccatgtacgagtgggactggtagacttactaaagtcaataaaggcgaagatacacgaaagaatcaaaagaatgattccagcgattagcacgccggaaaaataatttccaatcataagcatcatgtccatttaactaataaaaattttaaatcgccgaatgaacaaagtggaatataaaccatataaaaacaatagtttgtactgcaaaaataatatctatttttgttttcgaagatatggtaaaattaaatagtagtacacagcatgttataactaacagcagcaacggctcgtaattacttatcatttactagacgaaaaggtggtgggatattttcttgctcaaataatacgaatatatcacccatccattttatgcgatgtttatatactctaatctttaatagatctatagacgacgggtttaccaacaatatagattttatcgattcatctaatttaaacccttccttaaacgtgaatgatctattatctggcataacgatgactctacctgatgaatcggacaatgtactgggccatgtagaataaattatcaacgaattatcgtctacgaacatttatatcatttgttttaattttaggacgcgaataaatggatataaaatagaaaataacagatattacaaccagtgttatggccgcgcccaaccaggtaggcagttttattttatcttttactacaggttctcctggatgatgtacgttaccaactgcagacgtagttctagtacaattagacgtaagttccgcttgggaattttttaacgctaaagagttaacgttaatcgtgcacccaacgtatttacatctagttctttgaacatcttgattataatataaccattttctatctctagattcgtcggtgcactcatgtaaccaacataccctaggtcctaaatatttatctccggaattagattttggataattcgcgcaccaacaatttctatttcctttatgatcgttacaaaagacgtataatgccgtatccccaaaagtaaaataatcaggacgaataattctaataaactcagaacaatatctcgcatccatatgtttggagcaaatatcggaataagtagacatagccggtttccgttttgcacgtaaccattctaaacaattggggtttccaggatcgtttctacaaaatccagtcatgaaatcgtcacaatgttctgtcttgtaattattattaaatatttttggacagtgtttggtatttgtcttagaacaacattttgctacgctatcactatcgcccaggagataatccttttttataaaatgacatcgttgcccggatgctatataatcagtagcgtgttttaaatccttaatatattcaggagttacctcgttctgataatagattaatgatccaggacgaaatttgaaagaactacatggttctccatgaattaatacatattgtttagcaaattcaggaactataaaactactacaatgatctatcgacataccatctatcaaacaaaacttgggtttaatttctcccggagatgtttcataatagtacgtataactttcttctgcaaacttaacagctctattatattcaggataattaaaacctaattccatatatttgtctcgtatatctgctattcctggtgctattttgattctattaagagtaacggctgcccccatttttaataatcgtcagtatttaaactgttaaatgttggtatatcaacatttaccttatttcccgcagtataaggtttgttgcaggtatactgttcaggaatggttacatttatactttttctatagtcctgtctttcgatgttcatcacatatgcaaagaacagaataaacaaaataatgtaagaaataatattaaatatctgtgaattcgtaaatacattgattgccataataattacagcagctacaatacatacaatagacattcccacagtgttgccattacctccacgatacatttgagttactaagcaataggtaataactaagctagtaagaggcaatagaaaagatgagataaatatcatcaatatagagattagaggagggctatatagagccaagacgaacaaaatcaaaccgagtaacgttctaacatcattatttttgaagattcccaaataatcattcattcctccataatcgttttgcatcatacctccatctttaggcataaacgattgctgctgttcctctgtaaataaatctttatcaagcactccagcacccgcagagaagtcgtcaagcatattgtaatatcttaaataactcatttatatattaaaaaatgtcactattaaagatggagtataatctttatgccgaactaaaaaaaatgacttgtggtcaacccctaagtctttttaacgaagacggggatttcgtagaagttgaaccgggatcatcctttaagtttctgatacctaagggattttacgcctctccttccgtaaagacgagtctagtatttgaaacattaacaacgaccgataataaaattactagtatcaatccaacaaatgcgccaaagttatatcctcttcaacgcaaagtcgtatctgaagtagtttctaatatgaggaaaatgatcgaatcaaaacgtcctctatacatcactcttcacttggcgtgtggatttggtaagactattaccacgtgttatcttatggctacacacggtagaaaaaccgtcatttgcgtacccaataaaatgttaatacatcaatggaagacacaggtagaggcagtcggattggaacataagatatccatagatggagtaagtagtctattaaaggaactaaagactcaaagtccggatgtattaatagtagtcagtagacatctgacaaacgatgccttttgtaaatatatcaataagcattatgatttgttcatcttggatgaatcacatacgtataatctgatgaacaatacagcagttacaagatttttagcgtattatcctccgatgatgtgttattttttaactgctacacctagaccatctaacagaatttattgtaacagtattattaatattgccaagttatccgatctaaaaaaaactatctatgcagtagatagtttttttgagccatattccacagataatattagacatatgataaaacgattagatggaccatctaataaatatcatatatataccgagaagttattatctgtagacgagcctagaaatcaacttattcttaataccctggtagaagaattcaagtcaggaactattaatcgcattttagttattactaaactacgtgaacatatggtattcttctacaaacgattattagattttttcggatcagaggttgtatttataggagacgcccaaaatagacgtactccagatatggtcaaatcaatcaaggaactaaatagatttatattcgtatccaccttattttattccggtactggtttagatattcctagtttggattctttgttcatttgctcggcagtaatcaacaatatgcaaatagagcaattactagggagggtatgtcgagaaacagaactattagataggacggtatatgtatttcctagcacatccatcaaagaaataaagtacatgataggaaatttcgttcaacgaattattagtctgtctgtagataaactaggatttaaacaaaaaagttatcggaaacatcaagaatccgatcccacttctgtatgtacaacatcctccagagaagaacgtgtattaaatagaatatttaactcgcaaaatcgttaagaagtttaagcgacgatccgcatgctgcgcaggccagtgtattacccctcatagtattaatataatccaatgatacttttgtgatgtcggaaatcttaaccaatttagactgacaggcagaacacgtcatgcaatcatcatcgtcatcgataactgtagtcttgggcttctttttgcggctcttcattccggaacgcacattggtgctatccatttaggtagtaaaaaataagtcagaatatgccctatagcacgatcgtgcaaaacctggtatatcgtctctatctttatcacaatatagtgtatcgacatctttattattattgacctcgtttatcttggaacatggaatgggaacatttttgttatcaacggccacctttgccttaattccagatgttgtaaaattataactaaacagtctatcatcgacacaaatgaaattcttgtttagacgtttgtagtttacgtatgcggctcgttcgcgtctcattttttcagatattgcaggtactataatattaaaaataagaatgaaataacataggattaaaaataaagttatcatgacttctagcgctgatttaactaacttaaaagaattacttagtctgtacaaaagtttgaaattttcagattctgcggctatagaaaagtataattctttggtagaatggggaacatctacttactggaaaataggcgtgcaaaaggtagctaatgtcgagacgtcaatatctgattattatgatgaggtaaaaaataaaccgtttaatattgatccgggctattacattttcttaccggtatattttgggagcgtctttatttattcgaagggtaaaaatatggtagaacttggatctggaaactcttttcaaataccagatgatatgcgaagtgcgtgtaacaaagtattagacagcgataacggaatagactttctgagatttgttttgttaaacaatagatggataatggaagatgctatatcaaaatatcagtctccagttaatatatttaaactagctagtgagtacggattaaacatacccaaatatttagaaattgaaatagaggaagacacattatttgacgacgagttatactctattatagaacgctctttcgatgataaatttccaaaaatatccatatcgtatattaagttgggagaacttaggcggcaagttgtagactttttcaaattctcattcatgtatattgagtccatcaaggtagatcgtataggagataatatttttattcctagcgttataacaaaatcaggaaaaaagatattagtaaaagatgtagaccatttaatacgatccaaggttagagaacatacatttgtaaaagtaaaaaagaaaaacacattttccattttatacgactatgatggaaacggaacagaaactagaggagaagtaataaaacgaattatagacactataggacgagactattatgttaacggaaagtatttctctaaggttggtagtgcaggcttaaagcaattgactaataaattagatattaatgagtgcgcaactgtcgatgagttagttgatgagattaataaatccggaactgtaaaacgaaaaataaaaaaccaatcagcatttgatttaagcagagaatgtttgggatatccagaagcggattttataacgttagttaataacatgcggttcaaaatagaaaattgtaaggttgtaaatttcaatattgaaaatactaattgtttaaataacccgagtattgagactatatatggaaactttaaccagttcgtctcaatctttaatatcgtcaccgatgtcaaaaaaagattattcgagtgaaataatatgcgcctttgatataggtgcaaaaaatcctgccagaactgttttagaagtcaaggataactccgttagggtattggatatatcaaaattagactggagttctgattgggaaaggcacatagctaaagatttgtcacaatatgaatacactacagttcttctagaacgtcagcctagaaggtcgccgtacgtcaaatttatctattttattaaaggctttttatatcatacatcggctgccaaagttatttgcgtctcgcctgtcatgtctggtaattcatatagagatcgaaaaaagagatcggtcgaagcatttcttgattggatggacacattcggattgcgagactccgttccggatagacgcaaattagacgatgtagcggatagtttcaatttggctatgagatacgtattagataaatggaatactaattatacaccttataataggtgtaaatctagaaattacataaaaaaaatgtaataacgttagtaacgccattatggataatctatttacctttctacatgaaatagaagatagatatgccagaactatttttaactttcatctaataagttgcgatgaaataggagatatatatggtcttatgaaagaacgcatttcctcagaggatatgtttgataatatagtgtataataaagatatacatcatgccattaagaaactagtgtattgcgacatccaacttactaaacacattattaatcagaatacgtatccggtatttaacgattcttcacaagtgaaatgttgtcattatttcgatataaactcagataatagcaatattagctctcgtacagtagagatatttgagagggaaaagtcatctcttgtatcatatattaaaactaccaataagaagagaaaggtcaattatggggaaataaagaaaactgtacatggaggcactaatgcaaattacttttccggtaaaaagtctgatgagtatctgagcactacagtcaggtccaacattaatcaaccttggatcaaaaccatttctaagagaatgagagtagatatcattaatcactctatagtaacgcgtggaaaaagctctatattacaaactatagaaattatttttactaatagaacatgtgtgaaaatattcaaggattctactatgcacattattctatccaaggacaaggatgaaaaggggtgtatacacatgattgacaaattattctatgtctattataatttatttctgttgttcgaggatatcatccaaaacgagtactttaaagaagtagctaatgttgtaaaccacgtactcacggctacggcattagatgagaaattattcctaattaagaaaatggctgaacacgatgtttatggagttagcaatttcaaaatagggatgtttaacctgacatttattaagtcgttggatcataccgttttcccctctctgttagatgaggatagcaaaataaagttttttaaggggaaaaagctcaatattgtagcattacgatctctggaggattgtataaattacgtgactaaatccgagaatatgatagaaatgatgaaggaaagatcgactattttaaatagcatagatatagaaacggaatcggtagatcgtctaaaagaattgcttctaaaatgaaaaaaaaacactaattcagaaatggatcaacgactcggatataagtttttggtgcctgatcctaaagccggagttttttatagaccgttacatttccaatatgtatcgtattctaattttatattgcatcgattgcatgaaatcttgaccgtcaagcggccactcttatcgtttaagaataatacagaacgaattatgatagaaattagcaatgttaaagtgactcctccagattactcacctataatcgcgagtattaaaggtaagagttatgacgcattagccacgttcactgtaaatatctttaaagaggtaatgaccaaagagggtatatccatcactaaaataagtagttatgagggaaaagattctcatttgataaaaattccgctactaataggatacgggaataaaaatccacttgatacagccaagtatcttgttcctaatgtcataggtggagtctttatcaataaacaatctgtcgaaaaagtaggaattaatctagtagaaaagattacaacatggccaaaatttagggttgttaagccaaactcattcactttctcgttttcctccgtatcccctcctaatgtattaccgacaagatatcgccattacaagatatctctggatatatcacaattggaagcgttgaatatatcatcgacaaagacatttataacggtcaatattgttttgctgtctcaatatttatctagagtgagtctagaattcattagacgtagtttatcatacgatatgcctccagaagttgtctatctagtaaacgcgataatagatagtgctaaacgaattactgaatctattactgactttaatattgatacatacattaatgacctggtggaagctgaacacattaaacaaaaatctcagttaacgatcaacgagttcaaatatgaaatgctgcataactttttacctcatatgaactatacacccgatcaactaaagggattttatatgatatctttactaagaaagtttctctactgtatctaccacacttctagatatccagatagagattcgatggtttgtcatcgcatcctaacgtacggcaaatattttgagacgttggcacatgatgaattagagaattacataggcaacatccgaaacgatatcatgaacaatcacaagaacagaggcacttacgcggtaaacattcatgtactaacaactcctggacttaatcatgcattttctagtctattgagtggaaagttcaaaaagtcagacggtagttatcgaacacatcctcactattcatggatgcagaatatttctattcctaggagtgttggattttatccggatcaagtaaagatttcaaagatgttttctgtcagaaaataccatccaagtcaatatctttacttttgttcatcggacgttccggaaagaggtcctcaggtaggtttagtatctcaattgtctgtcttgagttccattacaaatatactaacgtctgagtatttggatttggaaaagaaaatttgtgagtatatcagatcatattataaagatgatataagttactttgaaacaggatttccaatcactatagaaaatgctctagtcgcatctcttaatccaaatatgatatgtgattttgtaactgactttagacgtagaaaacggatgggattcttcggtaacttggaggtaggtattactttagttagggatcacatgaatgaaattcgcattaatattggagcgggaagattagtcagaccattcttggttgtggataacggagagctcatgatggatgtgtgtccggagttagaaagcagattagacgacatgacattctctgacattcagaaagagtttccgcatgtcatcgaaatggtagatatagaacaatttacttttagtaacgtatgtgaatcggttcaaaaatttagaatgatgtcaaaggatgaaagaaagcaatacgatttatgtgactttcctgccgaatttagagatggatatgtagcatcttcactagtgggaatcaatcacaattctggacccagagctattcttggatgtgctcaagctaaacaagctatctcttgtctgagctcggatatacgaaataaaatagacaatggaattcatttgatgtatccagagaggccaatcgtgattagtaaggctttagaaacttcaaagattgcggctaattgcttcggccaacatgttactatagcattaatgtcgtacaaaggtatcaatcaagaggatggaattatcatcaaaaaacaatttattcagagaggcggtctcgatattgttacagccaagaaacatcaagtagaaattccgttggaaaactttaataacaaagaaagagataggtctaacgcctattcaaaattagaaagtaatggattagttagactgaatgctttcttggaatccggagacgctatagcacgaaatatctcatcaagaactcttgaagatgattttgctagagataatcagattagctttgatgtttccgaaaaatataccgatatgtacaaatctcgcgttgaacgagtacaagtagaacttactgacaaagttaaggtacgagtattaaccatgaaagaaagaagacccattctaggagacaaatttaccactagaacgagtcaaaagggaacagtcgcgtatatcgcggatgaaacggaacttccatacgatgaaaatggtatcacaccagatgtcattattaattctacatccatcttctctagaaaaactatatctatgttgatagaggttattttaacagccgcatattctgctaagccgtacaacaataagggagaaaaccgacctgtctgttttcctagtagtaacgaaacatccatcgatacatatatgcaattcgctaaacaatgttatgagcattcaaatccgaaattgtctgatgaagaattatcggataaaatcttttgtgaaaagattctctatgatcctgaaacggataagccttatgcatccaaagtattttttggaccaatttattacttgcgtctgaggcatttaactcaggacaaggcaaccgttagatgtagaggtaaaaagacgaagctcattagacaggcgaatgagggacgaaaacgtggaggaggtatcaagttcggagaaatggagagagactgtttaatagcgcatggtgcagccaatactattacagaagttttgaaagattcggaagaagattatcaagatgtgtatgtttgtgaaaattgtggagacatagcagcacaaatcaagggtattaatacatgtcttagatgttcaaaacttaatctctctcctctcttaacaaaaattgataccacacacgtatctaaagtatttcttactcaaatgaacgccagaggcgtaaaagttaaattagatttcgaacgaaggcctccttcgttttataaaccattagataaagttgatctcaaaccgtcttttctggtctaatattgtttagtagatacttatcaacatcatcaagattatcaagattatcaagattatcaagataagctaattcactaaacacattatcgatttcggtatcgttactcgcagaataaagttcgttatgatcctgatattcggaaatctgtggagtttcaggttttggtggatgtgtaacagctacttgagataccgaagtctgatattcagaaagctgtggatgttctggttcggcatccaccgatggtgttacaccactactaattggttcagtaacgtctgtggacgatggaggcaccacttctacaggttctggttctttatcctcagtcatcaacggagctacttcaatgcgaggaaatgtataatttggtaatggtttctcgtgtggatctgaagaagaggtaagatatctactagaaagataccgatcacgttctagttctcttttgtagaacttaactttttctttctcagcatctagttgatattccaacctcttcacgttactacgttcagatttcaattcacgttcgcatgggttacctccgcagtttttacgagcgatttcacgttcagccttcatgcgtctctccctctctctatcgagtttatcagagcagtctttctgaaggcgatcgaactccataaatttctccaacgctttgattgtttccatagatttccgaagttcagcttttaggactgtgattctttttctttcgaattcacagctggatgtacaaccgtttccattaccgccatctctaagtttcttttctagatcggcaacatttcatccccatgccttttacattcctcgagtctactgtcgtcgaaatatcgttccagctccttttcgacatcaataactttagcacgttgtctctcaagctctcttttgtagttatctgattccctggcacgtttaagatcttcatgcaattgagtcagctcttaacacaatctcttgcttcttcgtcatagtacgcgcaatcactgtgagatccattgttaccacgtctacactcggcgagctcgcgtttaagagattcaatttcccgtttgtattggtccatgtttccattgctaccaccattagatttacaggctgctagttgtcgttcgagatcagaaatacgggttttcttggaattgatttcgtcgatgtacttggcatcgaaacacttattaagttctttttccaattctacgattttatttctttcgcgagtcaattccctcctgtagtaactatctgttttgtcagattcacgctctctacgtagactttcttgcaagttactaatttgttccctagcacgtccgagtttagttttatatgctgaatagagttctgattcatcctttgagcagatctctagagatcgttcaagatccctgattctagtctttagcctatttacctcctcggaagatgctccgttaccgttgcgtttacactcgttaagctgtctatcaagatccatgattctatctctaagacgttgcatctctctttccatatcagcattgctttcattattacgtctgcagtcactcaactgtctttcaatatctgagattctatctctaagacgtcgcatctctctctgtttcggcattggtttcattattacgtctacagtcgttcaactgtctttcaagatctgatattctagattggagtctgctaatctctgtagcattttcacggcattcactcagttgtctttcaagatctgagattttagattggagtctgctaatctctgtaagatttcctcctccgctctcgatgcagtcggtcaacttattctctagttctctaatacgcgaacgcagtgcatcaacttcttgcgtgtcttcctggttgcgtgtacattcatcgagtctagattcgagatctctaacgcgtcgtcgttcttcctcaagttctctgcgtactacagaaagcgtgtccctatcttgttgatatttagcaatttctgattctagagtactgattttgcttacgtagttactaatatttgtcttggccttatcaagatcctccttgtatttgtcgcattccttgatatccctacgaagtctggacagttcccattcgacattacgacgtttatcgatttcagctcggagatcgtcatcgcgttgttttagccacatacgactgagttcaagttctcgttgacaagatccatctacttttccattcctaatagtatccagttccttttctagttctgaacgcatttctcgttccctatcaagcgattctctcaattctcggatagtcttcttatcaatttctaataaatctgaaccatcatctgtcccattttgaatatccctgtgttctttgatctcttttgtaagtcggtcgattctttcggttttataaacagaatccctttccaaagtcctaatcttactgagtttatcactaagttctgcattcaattcggtgagttttctcttggcttcttccaactctgttttaaactctccactatttccgcattcttcctcgcatttatctaaccattcaattagtttattaataactagttggtaatcagcgattcctatagccgttcttgtaattatgggaacataattaggatcttctaatggattgtatggcttgatagcatcatctttatcattattagggggatggacaaccttaattggttggtcctcatctcctccagtagcgtgtggttcttcaataccagtgttagtaataggcttaggcaaatgcttgtcgtacgcgggcacttcctcatccatcaagtatttataatcgggttctacttcagaatattcttttctaagagacgcgacttcgggagttagtagaagaactctgtttctgtatctatcaacgctggaatcaatactcaagttaaggatagcgaatacctcatcgtcatcatccgtatcttctgaaacaccatcatatgacatttcatgaagtctaacgtattgataaacagaatcagatttagtattaaacagatccttaacctttttagtaaacgcatatgtatattttagatctccagatttcataatatgatcacatgccttaaatgtcagtgcttccatgatataatctggaacactaatgggtgacgaaaaagatacagcaccatatgctacgttgataaataaatctgaaccactaagtagataatgattaatgttaaggaagaggaaatattcagtatatagatatgccttagcatcatatcttgtactaaacacgctaaacagtttattgatgtgatcaatttccaacagaataattagagcagcgggaataccaacaaacatattaccacatccgtattttctatgaatatcacatattatgttaaaaaatcttgatagaagagcgaatatctcgtctgacttaatgagacgtagttcagcagcagcataagtcataactgtaaatagaacatactttcctgtagtgttgattctagactccacatcaacaccattattaaaaatagttttatatacatctttaatctgctctccgttaatcgtcgaacgttctagtatacggaaacactttgatttcttatctgtagttaatgacttagtgatatcacgaagaatattacgaattacatttcttgtttttcttgagagacctgattcagaactcaactcatcgttccatagtttttttacctcagtggcgaaatctttggagtgcttggtacatttttcaataaggttcgtgacctccatttattataaaaaattttattcaaaacttaactacaatcgggtaattataaaatcgtagatctcccatgtggtggaatactaccatctatcgcatgtggatggacagtaggtaatggccatgggaacagtaatgtttgcatatttatctttcttgccagtattactgcatattgtcccaatgtttcgatgtgatgttctaacctatcaactgccgctgtatcacaacaatagtgtccgatgaaattaagattatgatccaatgtgtttaatatatgattatcaagtcttatacgatccgcgtcttttttgacaggatcaggttcttctacaggaagaagtttcggcctcttatgatattcatgtctgggaaacggtggtctagggtgaggctccggtatcggagtgggttttggattataatcatcatcgtctatgacatcatcttcgacttcgatatttattttgctatcttgatgatgtcctgtatcagttgcattttcagcactcgactgaatattagcgcattcattgtttattattaccatatttctaaacccaaaatgtatatgttgaacatcactactatcgttgatgagtcttatagcatgaattcgcttatcgttatcgggtttagcttctgtcaccttagcaattccttttttattaaactctacataatcatatccatttctattgtttgttctaatataaacgagtatagcatcattgctaaatttttcaatagtatcgaaaacagaatatcctaaaccatataatatatattcaggaacactcaaactaaatgtccaggattctcctaaatacgtaaactttaatagtgcgaaatcattcaaaaatctaccacttatagatagatagtacataaatgcgtatagtagtctacctatctctttattatgaaaaccggcattacgatcatatatgtcgtgatatacctgtgatccgtttacgttaaaccataaatacatgggtgatcctataaacatgaatttatttctaattctcagagctatagttaattgaccgtgtaatatttgcttacatgcatacttgatacgctcattaataagatttttatcattgctcgttatctcagaatcgtatatataaggagtaccatcgtgattcttaccagatattatacaaaatactatatataaaatatattgaccaacgttagtaatcatataaatgtttaacgttttaaattttgtattcaatgatccattatcatacgctagcatggtcttatgatattcattctttaaaatataatattgtgttagccattgcattggggctcctaatggagattttttattctcatccattttaggataggctttcataaagtccctaataacttcgtgaataatgtttctatgttttctactgatgcatgtatttgcttcgattttttttatcccatgtttcatctatcatagatttaaacgcagtaatgctcgcaacattaacatcttgaaccgttggtacaattccgttccataaatttataatgttcgccatttatataactcattttttgaatatacttttaattaacaaaagagttaagttactcatatggacgccgtccagtctgaacatcaatctttttagccagagatatcatagccgctcttagagtttcagcgtgattttccaacctaaatagaacttcatcgttgcgtttacaacacttttctatttgttcaaactttgttgttacattagtaatctttttttccaaattagttagccgttgtttgagagtttcctcattgtcgtctccatcggctttaacaattgcttcgcgtttagcctctggctttttagcagcctttgtagaaaaaaattcagttgctggaattgcaagatcgtcatctccggggaaaagagttccgtccatttaaagtacagattttagaaactgacactctgcgttatttatatttggtacaacacatggattataaatatcgatgttaataacatcagaaaatgtaaagtctatacattgttgcatcgtgttaaattttctaatggatctagtattattgggtccaacttctgcctgaaatccaaatatggaagcggatacaaaaccgtttcctggataaaccacacatctccacttttgctttacatcagaaattgtgtcattgacatcttgaactctcctatctaatgccggtgttccacctatagattttgaatattcgaatgctgcatgagtagcattaaattccttaatattgccataattttcatatattgagtaaccctggataaaaagtaaacacaccgcagccgtcgctaccacaataaaaaaaattgatagagagttcatttataatctattagaagctgacaaaatttttttacacgcatcagacaatgctttaataaatagttcaacatctacttttgtcatatcgaaccgatggtatgattctaacctagaattacatccgaaaaagttgactatgttcatagtcattaagtcattaacaaacaacattccagactctggattataagacgatactgtttcgtcacaatcacctaccttaatcatgtgattatgaatattggctattagagcaccttctaagaaatctataatatctttgaaacacgatttaaaatcaaaccacgaatatacttctacgaagaaagttagtttacccataggagagataactataaatggagatctagatacaaaatccggatctatgatagttttaacattattatattctctattaaatacctccacatctaaaaatgttaattttgaaactatgtcttcgtttattaccgtacctgaactaaacgctataagctctattgtttgagaactctttaaacgatattcttgaaatacatgtaacaaagtttcctttaactcggtcggtttatctaccatagttacagaatttgtatccttatctataatataataatcaaaatcgtataaagttatataattatcgcgttcagattgtgatcttttcaaatagactaaaaaccccatttctctagtaagtatcttatgtatatgtttgtaaaatatcttcatggtgggaatatgctctaccgcagttagccattcctcattgacagcggtagatgtattagacaaaactattccaatgtttaacaagggccattttacgagattattaaatccttgtttgataaatgtagccaatgagggttcgagttcaacgacgattgaattctcttcccgcggatgctgcatgatgaacgacgggatgttgttcgattgatttggaattctttttcgactttttgtttatattaaatattttaaaatttatagcggatagcaattcatgtaccacggataatgtagacgcgtattgcgcatcgatatctttattattagataaatttatcaataaatgtgagaagtttgcctcgttaaggtcttccatttaaatattatataaacatttgtgtttgtatcttattcgtcttttatggaatagttttttactagtaaagctgcaattacacactttgtccgtaaaacataaatataaacaccagcttttatcaatcgttccaaaaagtcgacggcggacatttttaacatggcatctattttaaatacacttaggtttttggaaaaaacatcattttataattgtaacgattcaataactaaagaaaagattaagattaaacataagggaatgtcatttgtattttataagccaaagcattctaccgttgttaaatacttgtctggaggaggtatatatcatgatgatttggttgtattggggaaggtaacaattaatgatctaaagatgatgctattttacatggatttatcatatcatggagtgacaagtagtggaacaatttacaaattgggatcgtctatcgatagactttctctaaataggactattgttacaaaagttaataattataattatgatacattttttgacgatgatgattgatcgctattgcacaattttgtttttttactttctaatatagcgtttagattctttttcatgtgcgaatattgatttactaaaatatctatgtttaacttttgttctataacgtccttatcggcggtatcggtacatatacgtaattcaccttcacaaaatacggagtcttcgataataatagccaatcgattattggatctagctgtctgtatcatattcaacatgtttaatatatcctttcgtttcccctttacaggcatcgatcgtagcatattttccgcgtctgagatggaaatgttaaaactacaaaaatgcgtaatgttagcccgtcctaatattggtacgtgtctataagtttggcatagtagaataatagacgtgtttaaatgccttccaaagtttaagaattctattagagtattgcattttgatagtttatcgcctacatcatcaaaaataagtaaaaagtgtgctgattttttatgattttgtgcgacagcaatacatttttctatgttacttttagttcgtatcagattatattctagagattcctgactactaacgaaattaatatgatttggccaaatgtatccatcataatctggattataaacgggtgtaaacaagaatacatgtttatattttttaactagtgtagaaaacagagatagtaaatagatagtttttccagatccagatcctcccgttaaaaccattctaaacggcatttttaataaattttctcttgaaaattgtttttcttggaaacaattcataattatatttacagttactaaattaatttgataataaatcaaaatatggaaaactaaggtcgttagtagggaggagaacaaagaaggcacatcgtgacataaataacatttattatcatgatgacaccagaaaacgacgaagagcagacatctgtgttctccgctactgtttacagagacaaaattcagggaaagaataaacgcaaacgcgtgattggtctatgtattagaatatctatggttatttcactactatctatgattaccatgtccgcgtttctcatagtgcgcctaaatcaatgcatgtctgctaacgaggctgctattactgacgccgctgttgccgttgctgctgcatcatctactcatagaaaggttgcgtctagcactacgcaatatgatcacaaagaaagctgtaatggtttatattaccagggttcttgttatatattacattcagactaccagttattctcggatgctaaagcaaattgcactgcggaatcatcaacactacccaataaatccgatgtcttgactacctggctcattgattatgttaaggatacatggggatctgatggtaatccaattacaaaaactacatccgattatcaagattctgatgtatcacaagaagttagaaagtatttttgtgttaaaacaatgaactaatatttatttttgtacattaataaatgaaatcgcttaatagacaaactgtaagtaggtttaagaagttgtcggtgccggtcgctataatgatgatactctcaaccattattagtggcataggaacatttctgcattacaaagaagaactgatgcctagtgcttgcgccaatggatggatacaatacgataaacattgttatttagatactaacattaaaatgtctacagataatgcggtttatcagtgtcgtaaattacgagccagattgcctagaccggatactagacatctgagagtattgtttagtattttttataaagattattgggtaagtttaaaaaagaccaataataaatggttagatattaataatgataaagatatagatattagtaaattaacaaattttaaacaactaaacagtacgacggatgctgaagcgtgttatatatacaagtctggaaaactggttgaaacagtatgtaaaagtactcaatctgtactatgtgttaaaaaattctacaagtgacaacaaaaaatgaattaataataagtcgttaacgtacgccgccatggacgccgcgtttgttattactccaatgggtgtgttgactataacagatacattgtatgatgatctcgatatctcaatcatggactttataggaccatacattataggtaacataaaaactgtccaaatagatgtacgggatataaaatattccgacatgcaaaaatgctactttagctataagggtaaaatagttcctcaggattctaatgatttggctagattcaacatttatagcatttgtgccgcatacagatcaaaaaataccatcatcatcatagcatgcgactatgatatcatgttagatatagaagataaacatcagccattttatctattcccatctattgatgtttttaacgctacaatcatagaagcgtataacctgtatacagctggagattatcatctaatcatcaatccttcagataatctgaaaatgaaattgtcgtttaattcttcattctgcatatcagacggcaatggatggatcataattgatgggaaatgcaatagtaattttttatcataaaagttgtaaagtaaataataaaacaataaatattgaactagtagtacgtatattgagcaatcagaaatgatgctggtacctcttatcacggtgaccgtagttgcgggaacaatattagtatgttatatattatatatttgtaggaaaaagatacgtactgtctataatgacaataaaattatcatgacaaaattaaaaaagataaagagttctaattccagcaaatctagtaaatcaactgatagcgaatcagactgggaggatcactgtagtgctatggaacaaaacaatgacgtagataatatttctaggaatgagatattggacgatgatagcttcgctggtagtttaatatgggataacgaatccaatgttatggcgcctagcacagaacacatttacgatagtgttgctggaagcacgctgctaataaataatgatcgtaatgaacagactatttatcagaacactacagtagtaattaatgaaacggagactgttgaagtacttaatgaagataccaaacagaatcctaactattcatccaatcctttcgtaaattataataaaaccagtatttgtagcaagtcaaatccgttcattacagaactcaacaataaatttagtgagaataatccgtttagacgagcacatagcgatgattatctaaataagcaagaacaagatcatgaacacgatgatatagaatcatcggtcgtatcattggtgtgattagtttcctttttataaaattgaagtaatatttagtattattgctgccgtcacgttgtacaaatggagatattccctgtattcggcatttctaaaattagcaattttattgctaataatgactgtagatattatatagatacagaacatcaaaaaattatatctgatgagatcaatagacagatggatgaaacggtacttcttaccaacatcttaagcgtagaagttgtaaatgacaatgagatgtaccatcttattcctcatagattatcgacgattatactctgtattagttctgtcggaggatgtgttatctctatagataatgacgtcaatggcaaaaatattctaacctttcccattgatcatgctgtaatcatatccccactgagtaaatgtgtcgtagttagcaagggtcctacaaccatactggttgctaaagcggatatacccagcaaacgattggtaacatcgtttacaaacgacatactgtatgtaaacaatctatcactgattaattatttgccgttgtctgtattcattattagacgagtcaccgactatttggatagacacatatgcgatcagatatttgctaataataagtggtattcccttataaccatcgacgataagcaatatcctattccatcaaattgtataggtatgtcttctgccaagtacataaattctagcatcgagcaagatactttaatacatgtttgtaacctcgagcatccattcgacttagtatacaaaaaaatgcagtcgtacaattctgtacctatcaaggaacaaatattgtacggtagaattgataatataaatatgagcattagtatttctgtggattaatagatttctagtatggggatcattaatcatctctaatctctaaatacctcataaaacgaaaaaaaagctattatcaaatactgtacggaatagattcattctcttctctttttatgaaactctgttgtatatctactgataaaactggaagcaaaaaatctgatagaaagaataagaataagatcaagatcaaggattatatggaacacgattattataaaataacaatagttcctggttcctcttccacgtctactagctcgtggtattatacacatgcctagtaatagtctctttgcgttgatggaaagcagactagaaataacaggctaaaatgttcagacaccataatagttcccaacccagataataacagagtaccatcaacacattcctttaaactcaatcccaaacccaaaaccgttaaaatgtatccggccaattgatagtagataatgaggtgtacagcgcatgataatttacacagtaaccaaaatgaaaatactttagtaattataagaaatatagatggtaacgtcatcatcaacaatccaataatatgccggagagtaaacattgacggataaaacaaaaatgctccgcataactctatcatggcaataacacaaccaaatacttgtaagattcctaaattagtagaaaatacaacggatatcgatgtataagtgatctcgagaaataataagaataaagtaatgcccgtaaagataaacatcaacattgtttggtaatcattaaaccaattagtatgacgttgaactaatttcacagtaaattttattccagtgttatcctcgcatgtataagtacctggtaagatatctttatattccataatcaatgagacatcactatctgataacgaatgaagtctagcactagtatgccatttacttaatattgtcgtcttggaagttttattataagttaaaatatcatggttatccaatttccatctaatatactttgtcggattatctatagtacacggaataatgatggtatcattacatgctgtatactctatggtctttgtagttgttataacaaccaacgtatagaggtatatcaacgatattctaactcttgacattttttatttatttaaaatgatacctttgttatttattttattctattttgctaacggtattgaatggcataagtttgaaacgagtgaagaaataatttctacttacttattagacgacgtattatacacgggtgttaatggggcggtatacacattttcaaataataaactaaacaaaactggtttagctaatactaattatatcacaacatctataaaagtagagaatgaggatacattagtatgcggaaccaataacggaaatcccaaatgttggaaaatagacggttcagacgacccaaaacatagaggtagaggatacgctccttatcaaaatagcaaagtaacgataatcagttacaacgaatgtgtactatctgacataaacatatcaaaagaaggaattaaacgatggagaagatttgacggaccatgtggttatgatttattcacggcggataacgtaattccaaaagatggtttacgaggagcattcgtcgataaagacggtacttatgacaaagtttacattcttttcactgatactatcggctcaaagagaattgttaaaattccgtatatagcacaaatgtgcctaaacgacgaaggtggtccatcatcattgtctagtcatagatggtcgacgtttctcaaagtcgaattagaatgtgatatcgacggaagaagttatagacaaattattcattctagaactataaaaacagataatgatacgatactatatgtattcttcgatagtccttattccaagtccgcattatgtacctattctatgaataccattaaacaatctttttctacgtcaaaattggaaggatatacaaagcaattgccgtctccagctcctggtatatgtctaccagctggaaaagttgttccacataccacgtttgaagtcatagaaaaatataatgtactagatgatattataaagcctttatctaaccaacctatcttcgaaggaccgtctggtgttaaatggttcgatataaaggagaaggaaaatgaacatcgggaatatagaatatacttcataaaagaaaattctatatattcgttcgatacaaaatctaaacaaactcgtagctcgcaagtcgatgcgcgactattttcagtaatggtaacttcgaaaccgttatttatagcagatatagggataggagtaggaatgccacaaatgaaaaaaatacttaaaatgtaatcttaatcgagtacaccacacgacaatgaacaaacataagacagattatgctggttatgcttgctgcgtaatatgcggtctaattgttggaattatttttacagcgacactattaaaagttgtagaacgtaaattagttcatacaccatcaatagataaaacgataaaagatgcatatattagagaagattgtcctactgactggataagctataataataaatgtatccatttatctactgatcgaaaaacctgggaggaaggacgtaatgcatgcaaagctctaaatccaaattcggatctaattaagatagagactccaaacgagttaagttttttaagaagcattagacgcggatattgggtaggagaatccgaaatattaaaccagacaaccccatataattttatagctaagaatgccacgaagaatggaactaaaaaacggaaatatatttgtagcacaacgaatactcccaaactgcattcgtgttacactatataacaattacactacatttttatcataccactacttcggttagatgttttagaaaaaaataaatatcgccgtaccgttcttgtttttataaaaataacaattaacaattatcaaattttttctttaatattttacgtggttgaccattcttggtggtaaaataatctcttagtgttggaatggaatgctgtttaatgtttccacactcatcgtatattttgacgtatgtagtcacatcgtttacgcaatagtcagactgtagttctatcatgcttcctacattagaaggaggaacagttttaaagtctcttggttttaatctattaccgttagttttcatgaaatcctttgttttatccacttcacattttaaataaatgtccactatacattcttttgttaattttactagatcgtcatgggtcatagaatttataggttccgtagtccatggatccaaactagcaaacttcgcgtatacggtatcgcgattagtgtatacaccaactgtatgaaaattaagaaaacagtttaataaatcaacagaaatatttaatcctccgtttgatacagatgcgccatatttatggatttcggattcacacgttgtttgtctgaggtgttcgtctagtgttgcttctacgtaaacttcgattcccatatattctttattgtcagaatcgcataccgatttatcatcatacactgtttgaaaactaaatggtatacacatcaaaataataaataataacgagtacattctgcaatattgttatcgtaattggaaaattagtgttcgagtgagtcggattatgtgagtactggattgtatattttattttatattttgtaataagaataaaatgctaatgtcaagtttattccaatagatgtcttattaaaaaacatatataataaataacaatggctgaatggcataaaattatcgaggatatctcaaaaaataataagttcgaggatgccgccatcgttgattacaagactacaaagaatgttctagctgctattcctaacagaacatttgccaagattaatccgggtgaaattattcctctcatcactaatcgtaatattctaaaacctcttattggtcagaaatattgtattgtatatactaactctctaatggatgagaacacgtatgctatggagttgcttactgggtacgcccctgtatctccgatcgttatagcgagaactcataccgcacttatatttttgatgggtaagccaacaacatccagacgtgacgtgtatagaacgtgtagagatcacgctacccgtgtacgcgcaactggtaattaaaataaaaagtaatattcatatgtagtatcaattttaaatgatgatgatgaaatggataatatccatattgacgatgtcaataatgccggtattggcatacagttcatcgatttttagatttcattcagaggatgtggaattatgttatgggcatttgtattttgataggatctataatgtagtaaatataaaatataatccgcatattccatatagatataattttattaatcgcacgttaaccgtagatgaactagacgataatgtcttttttacacatggttattttttaaaacacaaatatggttcacttaatcctagtttgattgtctcattatcaggaaacttaaaatataatgatatacaatgctcagtaaatgtatcgtgtctcattaaaaatttggcaacgagtacatctactatattaacatctaaacataagacttattctctacatcggtccacgtgtattactataataggatacgattctattatatggtataaagatataaatgacaagtataatgacatctatgattttactgcaatatgtatgctaatagcgtctacattgatagtgaccatatacgtgtttaaaaaaataaaaatgaactcttaattatgctatgctattagaaatggataaaatcaaaattacggttgattcaaaaattggtaatgttgttaccatatcgtataacttggaaaagataactattgatgttacacctaaaaagaaaaaagaaaaggatgtattattagcgcaatcagttgctgtcgaagaggcaaaagatgtcaaggtagaagaaaaaaatattatcgatattgaagatgacgatgatatggatgtagaaagcgcataatactatctataaacataagtatataataaatactttttatttacggtactcttgtagtggtgataccctactcaattatttttttaaaaaaatacttattctgattcttctagccatttccgtgttcgttcgaatgccacatcgacgttaaagataggggagtagttgaaatctagttctgcattgttggtacgcacctcaaatgtagtgttggatatcttcaacgtatagttgttgagtagtgatggttttctaaatagaattctcttcatatcattcttgcacgcgtacatttttagcatccatcttggaatcctagatccttgttctattcccaatggtttcatcaatagaagattaaacatatcgtacgaacacgatggagagtaatcgtagcaaaagtaagcatttcctttaatcttagatcccggatactggatatattttgcagccaacacgtgcatccatgcaacatttcctacatatacccggctatgcaccgcgtcatcatcgactgtacgatacataatgttaccgtgttgcttacattgctcgtaaaagactttcgtcaatttgtctccttctccgtaaattccagtgggtcttaggcaacaagtatacaattttgctccattcatgattacggaattattggctttcataaccagttgctcggccatacgtttactttttgcgtatacatgtcctggtgatatatcataaagggtatgctcatggccgatgaatggatcaccgtgtttatttggtcctattgcttccatgctactagtatagatcaaatacttgattcctaggtccacacaagctgccaatatagtctgtgttccataatagtttactttcatgatttcattatcggtgtattttccaaatacatccactagagcagccgtatgaataatcagatttaccccatctagcgcttctctcaccttatcaaagtcgtttatatcacattgtatatagtttataaccttaactttcgaggttattggttgtggatcttctacaatatctatgactctgatttcttgaacatcatctgcactaattaacagttttactatatacctgcctagaaatccggcaccaccagtaaccgcgtacacggccattgctgccactcataatatcagactacttattctattttactaaataatggctgtttgtataatagaccacgataatatcagaggagttatttactttgaaccagtccatggaaaagataaagttttaggatcagttattggattaaaatccggaacgtatagtttgataattcatcgttacggagatattagtcaaggatgtgattccataggcagtccagaaatatttatcggtaacatctttgtaaacagatatggtgtagcatatgtttatttagatacagatgtaaatatatctacaattattggaaaggcgttatctatttcaaaaaatgatcagagattagcgtgtggagttattggtatttcttacataaatgaaaagataatacattttcttacaattaacgagaatggcgtttgatatatcagttaatgcgtctaaaacaataaatgcattagtttacttttctactcagcaaaataaattagtcatacgtaatgaagttaatgatacacactacactgtcgaatttgatagggacaaagtagttgacacgtttatttcatataatagacataatgacaccatagagataagaggggtgcttccagaggaaactaatattggttgcgcggttaatacgccggttagtatgacttacttgtataataagtatagttttaaactgattttagcagaatatataagacacagaaatactatatccggcaatatttattcggcattgatgacactagatgatttggctattaaacagtatggagacattgatctattatttaatgagaaacttaaagtagactccgattcgggactatttgactttgtcaactttgtaaaggatatgatatgttgtgattctagaatagtagtagctctatctagtctagtatctaaacattgggaattgacaaataaaaagtataggtgtatggcattagccgaacatatatctgatagtattccaatatctgagctatctagactacgatacaatctatgtaagtatctacgcgggcacactgagagcatagaggatgaatttgattattttgaagacgatgattcgtctacatgttctgccgtaaccgacagggaaacggatgtataattttttttatagcgtgaaggatatgataaaaaatataattgttgtatttatcccattccaatcaccttatatgattctgtaaaaaaattatactgtaacacaatgaaggagtcttatagatgtatagaggtcagatactggtttgataaactgtttattccacataagtatgtttgactttatggttagacccgcatactttaacaaatcactgaaaattggagttaggtattgacctctcagaatcagttgccgttctggaacattaaatgtattttttatgatatactccaacgcatttatgtgggcatacaacaagtcattactaatggagtattccaagagttttagttgtctagtatttaacaagagaagagatttcaacagactgtttatgaactcgaatgccgcctcattgtcgcttatattgatgatgtcgaattctcccaatatcatcaccgatgagtagctcatcttgttatcgggatccaagttttctaaagatgtcattaaaccctcgatcatgaatggatttatcatcatcgtttttatgttggacatgagcttagtccgtttgtccacatctatagacgacgatttctgaattatttcatatatccctctctttaactccaggaacttgtcaggatggtctactttaatatgttctcgtctaagagatgaaaatctttggatggttgcacgcgacttttctctaaaggatgacgttgcccaagatcctctcttaaatgaatccatcttatccttggacaagatggacagtctattttccttagatggtttaatatttttgttacccatgatctataaaggtagacctaatcgtctcggatgaccatatatttattttcagttttattatacgcataaattgtaaaaaatatgttaggtttacaaaaatgtctcgtggggcattaatcgtttttgaaggattggacaaatctggaaaaacaacacaatgtatgaacatcatggaatcaataccttcaaacacaataaaataccttaactttcctcagagatccactgtcactggaaagatgatagatgactatctaactcgtaaaaaaacctataatgatcatatagttaatctattattttgtgcaaatagatgggagtttgcatcttttatacaagaacaactagaacagggaattactttaatagttgatagatacgcattttctggagtagcgtatgccgccgctaaaggcgcgtcaatgactctcagtaagagttatgaatctggattgcctaaacccgacttagttatattcttggaatctggtagcaaagaaattaatagaaacgtcggcgaggaaatttatgaagatgttacattccaacaaaaggtattacaagaatataaaaaaatgattgaagaaggagatattcattggcaaattatttcttctgaattcgaggaagatgtaaagaaggagttgattaagaatatagttatagaggctatacacacggttactggaccagtggggcaactgtggatgtaatagtgaaattacattttttataaatagatgttagtacagtgttataaatggatgaagcatattactctggcaacttggaatcagtactcggatacgtgtccgatatgcataccgaactcgcatcaatatctcaattagttattgccaagatagaaactatagataatgatatattaaacaaggacattgtaaattttatcatgtgtagatcaaacttggataatccatttatctctttcctagatactgtatatactattatagatcaagagatctatcagactgagttgattaattcattagacgacaatgaaattatcgattgtatagttaataagtttatgagcttttataaggataacctagaaaatatagtagatgctatcatcactctaaaatatataatgaataatccagattttaaaactacgtatgcagaagtactcggttccagaatagcggatatagatattaaacaagtgatacgtgagaatatactacaattgtctaatgatatccgcgaacgatatttgtgaaaaatattaaaaaaaaatactttttttattaaatgacgtcgcttcgcgaatttagaaaattatgctgtgatatatatcacgcatcaggatataaagaaaaatctaaattaattagagactttataacagatagggatgataaatatttgatcattaagctattgcttcccggattagacgatagaatttataacatgaacgataaacaaattataaaattatatagtataatatttaaacaatctcaggaagatatgctacaagatttaggatacggatatataggagacactattaggactttcttcaaagagaacacagaaatccgtccacgagataaaagcattttaactttagaagaagtggatagttttttaactacgttatcatccgtaactaaagaatcgcatcaaataaaattattgactgatatcgcatccgtttgtacatgtaatgatttaaaatgtgtagtcatgcttattgataaagatctaaaaattaaagcgggtcctcggtacgtacttaacgctattagtcctaatgcctatgatgtgtttagaaaatctaataacttgaaagagataatagaaaattcatctaaacaaaatctagactctatatctatttctgttatgactccaattaatcccatgttagcggaatcgtgtgattctgtcaataaggcgtttaaaaaatttccatcaggaatgtttgcggaagttaaatacgatggtgaaagagtacaagttcataaaaataataacgagtttgccttctttagtagaaacatgaaaccagtactctctcataaagtggattatctcaaagaatacataccgaaagcatttaaaaaagctacgtctatcgtattggattctgaaattgttcttgtagacgaacataatgtaccgctcccgtttggaagtttaggaatacacaaaaagaaagaatataaaaactctaacatgtgtttgttcgtgtttgactgtttgtactttgatggattcgatatgacggacattccattgtacgaacgaagatcttttctcaaagatgttatggttgaaatacccaatagaatagtattctcagagttgacgaatattagtaacgagtctcagttaactgacgtattggatgatgcactaacgagaaaattagaaggattggtcttaaaagatattaatggagtatacgaaccgggaaagagaagatggttaaaaataaagcgagactatttgaacgagggttccatggcagattctgccgatttagtagtactaggtgcttactatggtaaaggagcaaagggtggtatcatggcagtctttctaatgggttgttacgacgatgaatccggtaaatggaagacggtaactaaatgttccggtcacgatgataatacgttaagggagttgcaagaccaattaacgatgattaaaattaacaaggatcccaaaaaaattccagagtggttagtagttaataaaatctatattcccgattttgtagtagaggatccgaaacaatctcagatatgggaaatttcaggagcagagtttacatcttccaagtcacatacagcgaatggaatatcgattagatttcctagatttactaggattagagaagataaaacgtggaaagaatctactcatctaaacgatttagtaaacttgactaaatcttaatagttacatacaaattaaaataacactatttagttggtggtcgccatggatggtgttattgtatactgtctaaacgcgctagtaaaacatggcgaggaaataaatcatataaaaaatgatttcatgattaaaccatgttgtgaaagagtttgtgaaaaagttaagaacgttcacatcgacggacaatctaaaaacaatacagtgattgcagatttgccatatctggataatgctgtatcggatgtatgcaaatcgatatatatatatatatagtatcaagaatatccagatttgctaatttgataaagatagatgacgatgacaagactcctactggtgtatataattattttaaacctaaagatgccattcctgttattatatccataggaaaggatagagatgtttgtgaactattaatctcatctgataaagcgtgtgcgtgtatagagttaaattcatatcacgtagccattcttcccatgaatgtttccttttttaccaaaggaaatgcctcgttgattattctcctgtttgatttctctatcgatgcagcacctctcttaagaagtgtaaccgataataatgttattatatctagacactagcgtctacatgacgagcttccgagttccaattggttcaagttttacataagtataaagtccgactattgttctatattatatatggttgttgatggatctgtgatgcatgcgatagctgataatagaacttacgcaaatattagcaaaaatatattagacaatactacaattaacgatgagtgtagatgctgttattttgaaccacagattaggattcttgatagagatgagatgctcaatggatcatcgtgtgatatgaacagacattgtattatgatgaatttacctgatgtaggcaaatttggatctagtatgttggggaaatatgaacctgacatgattaagattgctctttcggtggctggtaatttaataagaaatcgagactacattcccgggagacgaggatatagctactacgtttacggtatagcctctagataatttttttaagcacgaaataaaaaacataattttaaaccaatctatttcatactattttgtgtgatcaccatggacataaagatagatattagtatttctggtgataaatttacggtgactactaggagggaaaatgaagaaagaaaaaaatatctacctctccaaaaagaaaaaactactgatgttatcaaacctgattatcttgagtacgatgacttgttagatagagatgagatgtctactattctagaggaatattttatgtacagaggtctattaggcctcagaataaaatatggacgactctttaacgaaattaaaaaattcgacaatgatgcggaagaacaattcggtactatagaagaactcaagcagaaacttagattaaattctgaagagggagcagataactttatagattatataaaggtacaaaaacaggatatcgtcaaacttactgtatacgattgcatatctatgataggattgtgtgcatgcgtggtagatgtttggagaaatgagaaactgttttctagatggaaatattgtttacgagctattaaactgtttattaatgatcacatgcttgataagataaaatctatactgcagaatagactagtatatgtggaaatgtcatagaaagttaatgagagcaaaaatatataaggttgtattccatatttgttattttttctgtaatagttaaaaaaatacattcgatggtctatctatcagattattatgtgttataaggtactttttctcataataaactagagtatgagtaagatagtgtttttcaaaacatataaatctaaaattgatggatgagatatacagctattaatttcgaaaatatataaatctaaaattgatggataagatatacagctattaatttcgaaaatatattttaatctgataactttaaacatggatttttgatggtggtttaacgttttaaaaaaagattttgttattgtagtatatgataatattaaaagatggatataaagaatttgctgactgcatgtactattttttacattactacattggctacggcagatatacctactccgccaccacacgctccggtaaacgggtcatgtgacaagggagaatatcttgataagaggcataatcaatgttgtaatcggtgtccacctggagaatttgccaaggttagatgtagtggtagtgataacacaaaatgtgaacgctgcccacctcatacatataccacaatcccaattattctaatggatgtcatcaatgtagaaaatgcccaacaggatcatttgataaggtaaagtgtaccggaacacagaacagtaaatgttcgtgtcttcctggttggtattgcgctactgattcttcacagactgaagattgttgaaattgtgtaccaaaaaggagatgtccatgcggatactttggtggaatagatgaacaaggaaatcctatttgtaaatcgtgctgtattggtgaatattgcaactacctacgtaattatagacttgatccattttctccatgcaaactatctaaatgtaattaattatgattttgatgataatgttaccatacattatatcgctacttggttagtgtattattcagtatgaagacctattaataattacttatcttttgacgatcttgttataattataatataaaaacttatggcatagtaacttataattgctaacacgataaattcgtaataatctgttttgttcaaaggaatctacaggcataaaaataaaaatataatttataatatactcttacagcgcgccatcatgaataacagcagtgaattgattgctgttattaatggatttagaaatagtggacgattttgtgatattagtatagttattaatgatgaaatgataaacgctcacagactcatcctatctggagcctccgaatatttttccattctgttttccaataattttatcgattctaatgaatacgaagttaatctaagtcatttagattatcaaagtgttaacgatttgatcgattacatttatgggatacctttgagcctaactaacgataacgtgaaatatattctttcaaccgctgattttttacaaattggatctgccattactgagtgcgaaaaatacatacttaaaaatctttgttctagaaactgtatcgatttctacatatacgctgataaatataataacaagaaaatagaatcagcgtcgtttaacacaatattacaaaatattttgaaactcatcaacgatgaaaactttaaatacttaacagaggaatcaatgataaaaattttaagcgatgatatgttaaatataaaaaatgaggatttcgccccactaattctcattaaatggttagagagtactcaacaatcatgcaccgtcgagttacttagatgcctcagaatatcattgctttccccacaagttataaaatcactttatagtcatcaactggttagttcaatctacgaatgtataacattcttaaacaatatagcattcttggatgaatcatttcctagataccatagcatcgagttgatatctatcggtataagtaattcgcatgataagatttccataaactgctacaatcataaaaaaaatacatgggaaatgatatcttcacgtagatataggtgtagtttcgcagtggccgtcctggataatattatttatatgatgggtggatatgatcagtccccgtatagaagttcaaaggttatagcgtacaatacatgtacaaattcttggatatatgatataccagagctaaaatatcctcgttctaattgtgggggactggctgatgacgaatacatttattgtataggcggcatacgcgatcaggattcatcgttgacatctagtattgataaatggaagccatcaaaaccatattggtagaagtatgctaaaatgcgcgaaccaaaatgtgatatgggggttgcgatgttaaacggattaatatatgtcatgggtggaatcgttaaaggtgacacgtgtaccgacgcactagagagtttatcagaagatggatggatgaagcatcaacgtcttccaataaaaatgtccaatatgtcgacgattgttcatgatggcaagatttatatatctggaggttacaacaatagtagtgtagttaatgtaatatcgaatctagtccttagctataatccgatatatgatgaatggaccaaattatcatcattaaacattcctagaattaatcccgctctatggtcagcgcataataaattatatgtaggaggaggaatatctgatgatgttcgaactaatacatctgaaacatacgataaagaaaaagattgttggacattggataatggtcacgtgttaccacgcaattatataatgtataaatgcgaaccgattaaacataaatatccattggaaaaaacacagtacacgaatgattttctaaagtatttggaaagttttataggtagttgatagaacaaaatacataattttgtaaaaataaatcactttttatactaatatgacacgattaccaatacttttgttactaatatcattagtatactctacaccttctcctcagacatctaaaaaataggtgatgatgcaactctatcatgtaatcgaaataatacaaatgactacgttgttatgagtgcttggtataaggagcccaattccattattcttttagctgctaaaagcgacgtcttgtattttgataattataccaaggataaaatatcttacgactctccatacgatgatctagttacaactatcacaattaaatcattgactgctagagatgccggtacttatgtatgtgcattctttatgacatcgcctacaaatgacactgataaagtagattatgaagaatactccacagagttgattgtaaatacagatagtgaatcgactatagacataatactatctggatctacacattcaccagaaactagttctgagaaaccagaggatatagataattttaattgctcgtcggtattcgaaatcgcgactccggaaccaattactgataatgtagaagatcatacagacaccgtcacatacactagtgatagcattaatacagtaagtgcaacatctggagaatccacaacagacgagactccggaaccaattactgataaagaagatcatacagttacagacactgtctcatacactacagtaagtacatcatctggaattgtcactactaaatcaaccaccgatgatgcggatctttatgatacgtacaatgatacagtaccatcaactactgtaggtagtagtacaacctctattagtaattataaaaccaaggactttgtagaaatatttggtattaccgcattaattatattgtcggccgtggcaatattctgtattacgtattatatatgtaataaacgttcacgtaaatacaaaacagagaacaaagtctagatttttgacttacataaatgtctgggatagtaaaatctatcatattgagcggaccatctggtttaggaaagacagccatagccaaaagactatgggaatatatttggatttgtggtgtcccataccactagatttcctcgtcctatggaacgagaaggtgtcgattaccattacgttaacagagaggccatctggaagggaatagccgccggaaactttctagaacatactgagtttttaggaaatatttacggaacttctaaaactgctgtgaatacagcggctattaataatcgtatttgtgtgatggatctaaacatcgatggcgttagaagtcttaaaaatacgtacctaatgccttactcggtgtatataagacctacctctcttaaaatggttgagaccaagcttcgtcgtagaaacactgaagcggatgatgagattcatcgtcgtgtgatgttggcaaaaactgacatggatgaggcaggtgaagccggtctattcgacactattatcattgaagatgatgtgaatttagcatatagtaagttaattcagatactacaggaccgtattagaatgtattttaacactaattaaagacttaagacttaaaacttgataattaataatataactcgtttttatatgtggctatttcaacgtctaatgtattagttaaatattaaaacttaccacgtaaaacttaaaatttaaaatgatatttcattgacagatagatcacacattatgaactttcaaggacttgtgttaactgacaattgcaaaaatcaatgggtcgttggaccattaataggaaaaggtggattcggtagtatttatactactaatgacaataattatgtagtaaaaatagagcccaaagctaacggatcattatttaccgaacaggcattttatactagagtacttaaaccatccgttatcgaagaatggaaaaaatctcacaatataaagcacgtaggtcttatcacgtgcaaggcatttggtctatacaaatccattaatgtggaatatagattcttggtaattaatagattaggtgcagatctagatgcggtgatcagagccaataataatagattaccaaaaaggtcggtgatgttgatcggaatcgaaatcttaaataccatacaatttatgcacgagcaaggatattctcacggagatattaaagcgagtaatatagtcttggatcaaatagataagaataaattatatctagtggattacggattggtttctaaattcatgtctaatggcgaacatgttccatttataagaaatccaaataaaatggataacggtactctagaatttacacctatagattcgcataaaggatacgttgtatctagacgtggagatctagaaacacttggatattgtatgattagatggttgggaggtatcttgccatggactaagatatctgaaacaaagaattgtgcattagtaagtgccacaaaacagaaatatgttaacaatactgcgactttgttaatgaccagtttgcaatatgcacctagagaattgctgcaatatattaccatggtaaactctttgacatattttgaggaacccaattacgacgagtttcggcacatattaatgcagggtgtatattattaagtgtggtgtttggttgatgtaaaatttttgttgataaaaattaaaaaaataacttaatttattattgatctcgtgtgtacaaccgaaatcatggcgatgttttacgcacacgctctcggtgggtacgacgagaatcttcatgcctttcctggaatatcatcgactgttgccaatgatgtcaggaaatattctgttgtgtcagtttataataacaagtatgacattgtaaaagacaaatatatgtggtgttacagtcaggtgaacaagagatatattggagcactgctgcctatgtttgagtgcaatgaatatctacaaattggagatccgatccatgatcaagaaggaaatcaaatttctatcatcacataccgccacaaaaactactatgctctaagcggaatcgggtacgagagtctagacttgtgtttggaaggagtagggattcatcatcacacacttgaagcaggaaacgctgtatatggaaaagttcaacatgattattctactatcaaagagaaggccaaagaaatgagtacacttagtccaggacctataattgattaccacgtctggataggagattgtatctgtcaagttactgctgtggacgtacatggaaaggaaattatgagaatgagattcaaaaagggtgcggtgcttccgatcccaaatctggtaaaagttaaacttggggagaatgatacagaaaatctttcttctactatatcggcggcaccatcgaggtaaccacctctctggaagacagcgtgaataatgtactcatgaaacgtttggaaactatacgccatatgtggtctgttgtatatgatcattttgatattgtgaatggtaaagaatgctgttatgtgcatacgcatttgtctaatcaaaatcttataccgagtactgtaaaaacaaatttgtacatgaagactatgggatcatgcattcaaatggattccatggaagctctagagtatcttagcgaactgaaggaatcaggtggatggagtcccagaccagaaatgcaggaatttgaatatccagatggagtggaagacactgaatcaattgagagattggtagaggagttcttcaatagatcagaacttcaggctggtaaattagtcaaatttggtaattctattaattgttaaacatacatctgtttcagctaagcaactaagaacacgtatacggcagcagcttccttttatactctcatcttttaccaacacaaagggtggatatttgttcattggagttgataataatacacacaaagtatttggattcacggtgggttacgactacctcagactgatagagaatgatatagaaaagcatatcaaaagactttgtgttgtgcatttctgtgagaagaaagaggacatcaagtacacgtgtcgattcatcaaggtatataaacctggggatgaggctacctcgacatacgtgtgcgctatcaaagtggaaagatgctgttgtgctgtgtttgcagattggccagaatcatggtatatggatactaatggtatcaataagtattctccagatgaatgggtgtcacatataaaattttaattaatgtaatagagaacaaataataaggttgtaatatcatatagacaataactaacaattaattagtaactgttatctcttttttaactaaccaactaactatatacctattaatacatcgtaattatagttcttaacatctattaatcattaattcgcttctttaattttttataaactaacattgttaattgaaaagggataacatgttacagaatataaattatatatggatttttttaaaaaggaaatacttgactggagtatatatttatctcttcattatatagcacgcgtgtgttccaatttttccacatcccatataatacaggattataatctcgttcgaacatacgagaaagtggataaaacaatagttgattttttatctaggttgccaaatttattccatattttagaatatggggaaaatattctacatatttattctatggatgatgctaatacgaatattataattttttttctagatagagtattaaatattaataagaacgggtcatttatacacaatctcgggttatcatcatccattaatataaaagaatatgtatatcaattagttaataatgatcatccagataataggataagactaatgcttgaaaatggacgtagaacaagacattttttgtcctatatatcagatacagttaatatctatatatgtattttaataaatcatggattttatatagatgccgaagacagttacggttgtacattattacatagatgtatatatcactataagaaatcagaatcagaatcatacaatgaattaattaagatattgttaaataatggatccgatgtagataaaaaagatacgtacggaaacacaccttttatcctattatgtaaacacgatatcaacaacgtggaattgtttgagatatgtttagagaatgctaatatagactctgtagactttaatagatatacacctcttcattatgtctcatgtcgtaataaatatgattttgtaaagttattaatttctaaaggagcaaatgttaatgcgcgtaataaattcggaactactccattttattgtggaattatacacggtatctcgcttataaaactatatttggaatcagacacagagttagaaatagataatgaacatatagttcgtcatttaataatttttgatgctgttgaatctttagattatctattatccagaggagttattgatattaactatcgtactatatacaacgaaacatctatttacgacgctgtcagttataatgcgtataatacgttggtctatctattaaacaaaaatggtgattttgagacgattactactagtggatgtacatgtatttcggaagcagtcgcaaacaacaacaaaataataatggaagtactattgtctaaacgaccatctttgaaaattatgatacagtctatgatagcaattactaaacataaacagcataatgcagatttattgaaaatgtgtataaaatatactgcgtgtatgaccgattatgatactcttatagatgtacagtcgctacagcaatataaatggtatattttaagatgtttcgatgaaatagatatcatgaagagatgttatataaaaaataaaactgtattccaattagttttttgtatcaaagacattaatactttaatgagatacggtaaacatccttctttcgtgaaatgcactagtctcgacgtatacggaagtcgtgtacgtaatatcatagcatctattagatatcgtcagagattaattagtctattatccaagaagctggatcctggagataaatggtcgtgttttcctaacgaaataaaatataaaatattggaaaactttaacgataacgaactgtccacatatctaaaaatcttataaacattattaaaatataaaatctaagtaggataaaatcacactacatcattgtttccttttagtgctcgacagtgtatactatttttaacactcataaataaaaatgaaaacgatttccgttgttacgttgttatgcgtactacctgctgttgtttattcaacatgtactgtacccactatgaataacgctaaattaacgtctaccgaaacatcgtttaatgataaacagaaagttacatttacatgtgatcagggatatcattctttggatccaaatgctgtctgtgaaacagataaatggaaatacgaaaatccatgcaagaaaatgtgcacagtttctgattatgtctctgaattatatgataagccattatacgaagtgaattccaccatgacactaagttgcaacggcgaaacaaaatattttcgttgcgaagaaaaaaatggaaatacttcttggaatgatactgttacgtgtcctaatgcggaatgtcaacctcttcaattagaacacggatcgtgtcaaccagttaaagaaaaatactcatttggggaatatataactatcaactgtgatgttggatatgaggttattggtgctttgtacataagttgtacagctaattcttggaatgttattccatcatgtcaacaaaaatgtgatatgccgtctctatctaacggattaatttccggatctacattttctatcggtggcgttatacatcttagttgtaaaagtggttttatactaacgggatctccatcatccacatgtatcgacggtaaatggaatcccatactcccaacatgtgtacgatctaacgaaaaatttgatccagtggatgatggtcccgacgatgagacagatttgagcaaactctcgaaagacgttgtacaatatgaacaagaaatagaatcgttagaagcaacttatcatataatcatagtggcgttaacaattatgggcgtcatatttttaatctccgttatagtattagtttgttcctgtgacaaaaataatgaccaatataagttccataaattgctaccgtaaatataaatccgttaaaataattaataattaataacgaacaagtatcaaaagattaaagaattatagctagaatcaattgagatgtcttcttcagtggatgttgatatctacgatgccgttagagcatttttactcaggcactattataacaagagatttattgtgtatggaagaagtaacgccatattacataatatatacaggctatttacaagatgcgccgttataccgttcgatgatatagtacgtactatgccaaatgaatcacgtgttaaacaatgggtgatggatacacttaatggtataatgatgaatgaacgcgatattactgtatgtgtgggcaccggaatactattcatggaaatgtttttcgattacaataaaaatagtatcaacaatcaactaatgtatgatataattaatagcgtatctataattctagctaatgagagatatagaagcgcttttaacgacgatggtatatacatccgtagaaatatgattaacaagttgtacggatacgcatctctaactactattggcacgatcgctggaggtgtttgttattatctgttgatgcatctagttagtttgtataaataattatttcaatatactagttaaaattttaagattttaaatgtataaaaaactaataacgtttttatttgtaataggtgcagtagcatcctattcgaataatgagtacactccgtttaataaactgagtgtaaaactctatatagatggagtagataatatagaaaattcatatactgatgataataatgaattggtgttaaattttaaagagtacacaatttctattattacagagtcatgcgacgtcggatttgattccatagatatagatgttataaacgactataaaattattgatatgtataccattgactcgtctactattcaacgcagaggtcacacgtgtagaatatctaccaaattatcatgccattatgataagtacccttatattcacaaatatgatggtgatgagcgacaatattctattactgcagagggaaaatgctataaaggaataaaatatgaaataagtatgatcaacgatgatactctattgagaaaacatactcttaaaattggatctacttatatatttgatcgtcatggacatagtaatacatattattcaaaatatgatttttaaaaatttaaaatatattatcacttcagtgacagtagtcaaataacaaacaacaccatgagatatattataattctcgcagttttgttcattaatagtatacatgctaaaataactagttataagtttgaatccgtcaattttgattccaaaattgaatggactggggatggtctatacaatatatcccttaaaaattatggcatcaagacgtggcaaacaatgtatacaaatgtaccagaaggaacatacgacatatccgcatttccaaagaatgatttcgtatctttctgggttaaatttgaacaaggcgattataaagtggaagagtattgtacgggactatgcgtcgaagtaaaaattggaccaccgactgtaacattaactgaatacgacgaccatatcaatttgtacatcgagcatccgtatgctactagaggtagcaaaaagattcctatttacaaacgcggtgacatgtgtgatatctacttgttgtatacggctaacttcacattcggagattctaaagaaccagtaccatatgatatcgatgactacgattgcacgtctacaggttgcagcatagactttgtcacaacagaaaaagtgtgcgtgacagcacagggagccacagaagggtttctcgaaaaaattactccatggagttcggaagtatgtctgacacctaaaaagagtgtatatacatgcgcaattagatccaaagaagatgttcccaatttcaaggacaaaatggccagagttatcaagagaaaatttaataaacagtctcaatcttatttaactaaatttctcggtagcacatcaaatgatgttaccacttttcttagcatgcttaacttgactaaatattcataactaatttttattaatgatacaaaaacgaaataaaactgcatattatacactggttaacgcccttataggctctaaccattttcaagatgaggtccctgattatagtccttctgttcccctctatcatctactccatgtctattagacgatgtgagaagactgaagaggaaacatggggattgaaaatagggttgtgtataattgccaaagatttttatcccgaaagaactgattgcagtgttcatctcccaactgcaagtgaaggattgataactgaaggcaatggattcagggatatacgaaacaccgataaattataaaaaaagcaatgtgtccgctgtttccgttaataatactattttcgtaactggcggattattcataaataactctaatagcacgatcgtggttaacaatatggaaaaacttgacatttataaagacaaacaatggtcgattatagaaatgcctatggctagggtatatcacggcatcgactcgacatttggaatgttatattttgccggaggtctatccgttaccgaacaatatggtaatttagagaaaaacaacgagatatcttgttacaatcctagaacgaataagtggtttgatatttcatatactatttataagatatccatatcatcattgtgtaaactaaataacgtcttctatgtatttagtaaggacattggatatgtggaaaagtatgatggtgcatggaagttagtacatgatcgtctccccgctataaaggcattatcaacttctccttattgattgaaaatgaaaatataaatagtttttatgtatagcagtattaccctatagttttattgcttactactaacatggatacagatgttacaaatgtagaagatatcataaatgaaatagatagagagaaagaagaaatactaaaaaatgtagaaattgaaaataataaaaacattaacaagaatcatcccaatgaatatattagagaagcactcgttattaataccagtagtaatagtgattccattgataaagaagttatagaatgtatctgtcacgatgtaggaatatagatcatatctactaatttttataatcaatacaaaacataaaaaacaactcgttattacatagcaggcatggaatccttcaagtattgttttgataacgatggcaagaaatggattatcggaaatactttatattctggtaattcaatactatataaggtcagaaaaaatttcactagttcgttctacaattacgtaatgaagatagatcacaaatcacacaagccattgttgtctgaaatacgattctatatatctgtattggatcctttgactatcgacaactggacacgggaacgtggtataaagtatttggctattccagatctgtatggaattggagaaaccgatgattatatgttcttcgttataaagaatttgggaagagtattcgccccaaaggatactgaatcagtcttcgaagcatgcgtcactatgataaacacgttagagtttatacactctcgaggatttacccatggaaaaatagaaccgaggaatatactgattagaaataaacgtctttcactaattgactattctagaactaacaaactatacaagagtggaaactcacatatagattacaacgaggacatgataacttcaggaaatatcaattatatgtgtgtagacaatcatcttggagcaacagtttcaaaacgaggagatttagaaatgttgggatattgcatgatagaatggttcggtggcaaacttccatggaaaaacgaaagtagtataaaagtaataaaacaaaaaaaagaatataaaaaatttatagctactttctttgaggactgttttcctgaaggaaatgaacctctggaattagttagatatatagaattagtatacacgttagattattctcaaactcctaattatgacagactacgtaaactgtttatacaagattgaaattatattctttttttatagagtgtggtagtgttacggatatctaatattaatattagactatctctatcgcgctacacgaccaatatcgattactatggatatcttcagggaaatcgcatcttctatgaaaggagagaatgtattcatttctccagcgtcaatctcgtcagtattgacaatactgtattatggagctaatggatccactgctgaacagctatcaaaatatgtagaaacggaggagaacacggataaggttagcgctcaaaatatctcattcaaatccatgaataaagtatatgggcgatattctgccgtgtttaaagattcctttttgagaaaaattggcgataagtttcaaactgttgacttcactgattgtcgcactatagatgcaatcaacaagtgtgtagatatctttactgaggggaaaatcaatccactattggatgaaccattgtctcctagcaattagtgccgtatactttaaagcaaaatggttgacgccattcgaaaaggaatttaccagtgattatcccttttacgtatctccgacggaaatggtagatgtaagtatgatgtctatgtacggcaaggcatttaatcacgcatctgtaaaggaatcattcggcaacttttcaatcatagaactgccatatgttggagatactagtatgatggtcattcttccagacaagattgatggattagaatccatagaacaaaatctaacagatacaaattttaagaaatggtgtaactctctggaagctacgtttatcgatgttcacattcccaagtttaaggtaacaggctcgtataatctggtggatactctagtaaagtcaggactgacagaggtgttcggttcaactggagattatagcaatatgtgtaattcagatgtgagtgtcgacgctatgatccacaaaacgtatatagatgtcaatgaagagtatacagaagcagctgcagcaacttgtgcactggtgtcagactgtgcatcaacaattacaaatgagttctgtgtagatcatccgttcatctatgtgattaggcatgttgatggaaaaattcttttcgttggtagatattgctctccgacaactaattgttaaccattttttttaaaaaatagaaaaaacatgtggtattagtgcaggtcgttattcttccaattgcaattggtaagatgacggccaactttagtacccacgtcttttcaccacagcactgtggatgtgacagactgaccagtattgatgacgtcagacaatgtttgactgaatatatttattggtcgtcctatgcataccgcaacaggcaatgcgctggacaattgtattccacactcctctcttttagagatgatgcggaattagtgttcatcgacattcgcgagctggtaaaaaatatgccgtgggatgatgtcaaagattgtgcagaaatcatccgttgttatataccggatgagcaaaaaaccatcagagagatttcggccatcatcggactttgtgcatatgctgctacttactggggaggtgaagaccatcccactagtaacagtctgaacgcattgtttgtgatgcttgagatgctaaattacgtggattataacatcatattccggcgtatgaattgatgagttgtacatcttgacattttcttctttcttctcttctccctttcccagaaacaaacttttttacccactataaaataaaatgagtatactacctgttatatttctttctatatttttttattcttcattcgttcagacttttaacgcgtctgaatgtatcgacaaagggcaatattttgcatcattcatggagttagaaaacgagccagtaatcttaccatgtcctcaaataaatacgctatcatccggatataatatattagatattttatgggaaaaacgaggagcggataatgatagaattataccgatagataatggtagcaatatgctaattctgaacccgacacaatcagactctggtatttatatatgcattaccacgaacgaaacctactgtgacatgatgtcgttaaatttgacaatcgtgtctgtctcagaatcaaatatagattttatctcgtatccacaaatagtaaatgagagatctactggcgaaatggtatgtcccaatattaatgcatttattgctagtaacgtaaacgcagatattatatggagcgggcatcgacgccttagaaataagagacttaaacaacggacacctggaattattaccatagaagatgttagaaaaaatgatgctggttattatacatgtgttttagaatatatatacggtggcaaaacatataacgtaaccagaattgtaaaattagaggtacgggatagaataatacatcctactatgcaattaccagatggcattgtaacttcaataggtagtaatttgactattgcatgcagagtatcgttgagacctcccacaacggatgcagacgtcttttggataagtaatggtatgtattacgaagaagatgatggggacggaaacggtagaataagtgtagcaaataaaatctatatgaccgataagagacgtgttattacatcccggttaaacattaatcctgtcaaggaagaagatgctacaacgtttacgtgtatggcgtttactattcctagcatcagtaaaacagttactgttagtataacgtgaatgtatgttgttacatttccatgtcaattgagtttataagaatttttatacattatcttccaacaagcaattgacgaacgtattgctatgattaactcccacgatactatgcatattattaatcattaacttgcagactatacctagagctattttgacatactcgtgttcttgtgtaattgcagtatctatattattaaagtacgtaaatctagctatagttttattatttaattttagataatataccgtctccttatttttaaaaattgccacatcctttattaaatcatgaatgggaatttctatgtcatagttaatatattgtgaacaacaagagcagatatctataggaaagggtggaatgcgatacattgatctatgtagttttaaaacacacgcaaactttgaagaatttatataaatcattccatcgatacatccttctatgttgagatgtatatatccaggaattcgtttattaatatcgggaaatgtataaactaaaacattgcccggaagcggagcttctaccggagttatatcagtttttaacttacaaaatgtaaccaatacctttgcatgacttgttttgttcggcaacgttagtttaaacttgacgaatggattaattacaatagcatgatccgcgcatctattaagtttttttactttaacgcccttgtatgtttttacagagactttatctaaatttctagtgcttgtatgtgttataaatataacgggatatagaactgaatcacctaccttagatacccaattacattttatcagatccagataataaacaaattttgtcgccctaactaattctatattgttatatattttacaattggttatgatatcatgtaataacttggagtctaacgcgcatcgtcgtacgtttatacaattgtgatttagtgtagtatatctacacatgtatttttccgcactatagtattctggactagtgataaaactatcgttatatctgtcttcaatgaactcatcgagatattgctctctgtcatattcatacacctgcataaactttctagacatcttacaatccgtgttattttaggatcatatttacatatttacgggtatatcaaagatgttagattagttaatgggaatcgtctataataatgaatattaaacaattatatgaggacttttaccacaaagcatcataaaaatgagtcgtcgtctgatttatgttttaaatatcaaccgcgaatcaactcataaaatacaagagaatgaaatatatacatattttagtcattgcaatatagaccatacttctacagaacttgattttgtagttaaaaactatgatctaaacagacgacaacctgtaactgggtatactgcactacactgctatttgtataataattactttacaaacgatgtactgaagatattattaaatcatggagtggatgtaacgatgaaaaccagtagcggacgtatgcctgtttatatattgcttactagatgttgcaatatttcacatgatgtagtgatagatatgatagacaaagataaaaaccacttattacatagagactattccaacctattactagagtatataaaatctcgttacatgttattaaaggaagaggatatcgatgagaacatagtatccactttattagataagggaatcgatcctaactttaaacaagacggatatacagcgttacattattattatttgtgtctcgcacacgtttataaaccaggtgagtgtagaaaaccgataacgataaaaaaggccaagcgaattatttctttgtttatacaacatggagctaatctaaacgcgttagataattgtggtaatacaccattccatttgtatcttagtattgaaatgtgtaataatattcatatgactaaaatgctgttgacttttaatccgaatttcgaaatatgtaataatcatggattaacgcctatactatgttatataacttccgactacatacaacacgatattcttgttatgttaatacatcactatgaaacaaatgttggagaaatgccgatagatgagcgtcgtatgatcgtattcgagtttatcaaaacatattctacacgtcctgcagattcgataacttatttgatgaataggtttaaaaatatagatatttatacccgctatgaaggaaagacattattacacgtagcatgtgaatataataatacacacgtaatagattatcttatacgtatcaacggagatataaatgcgttaaccgacaataacaaacacgctacacaactcattatagataacaaagaaaattccccatataccattaattgtttactgtatatacttagatatattgtagataagaatgtgataagatcgttggtggatcaacttccatctctacctatcttcgatataaaatcatttgagaaattcatatcctactgtatacttttagatgacacattttacaatagacacgttaggaatcgcgattctaaaacgtatcgatacgcattttcaaaatacatgtcgtttgataaatacgatggtataataactaaatgtcataaagaaacaatattgctcaaactatccactgttctagacactacactatatgcagttttaagatgccataattcgaaaaagttaagaagatacctcaccgagttaaaaaaatataataacgataagtcctttaaaatatattctaatattatgaatgagagataccttaatgtatattataaagatatgtacgtgtcaaaggtatatgataaactatttcctgttttcacagataaaaattgtctactaacattactaccttcagaaattatatacgaaatattatacatgctgacaattaacgatctttataatatatcgtatccacctaccaaagtatagttgtatttttctcatgcgatgtgtgtaaaaaaactgatattatataaatattttagtgccgtataataaagatgacgatgaaaatgatggtacatatatatttcgtatcattatcattattgttattgctattccacagttacgccatagacatcgaaaatgaaatcacagaattcttcaataaaatgagagatactctaccagctaaagactctaaatggttgaatccagcatgtatgttcggaggcacaatgaatgatatagccgctctaggagagccattcagcgcaaagtgtcctcctattgaagacagtcttttatcgcacagatataaagactatgtggttaaatgggaaaggctagaaaaaaatagacggcgacaggtttctaataaacgtgttaaacatggtgatttatggatagccaactatacatctaaattcagtaaccgtaggtatttgtgcaccgtaactacaaagaatggtgactgtgttcagggtatagttagatctcatattagaaaacctccttcatgcattccaaaaacatatgaactaggtactcatgataagtatggcatagacttatactgtggaattctttacgcaaaacattataataatataacttggtataaagataataaggaaattaatatcgacgacattaagtattcacaaacgggaaaggaattaattattcataatccagagttagaagatagcggaagatacgactgttacgttcattacgacgacgttagaatcaagaatgatatcgtagtatcaagatgtaaaatacttacggttataccgtcacaagaccacaggtttaaactaatactagatccaaaaatcaacgtaacgataggagaacctgccaatataacatgcactgctgtgtcaacgtcattattgattgacgatgtactgattgaatgggaaaatccatccggatggcttataggattcgattttgatgtatactctgttttaactagtagaggcggtattaccgaggcgaccttgtactttgaaaatgttactgaagaatatataggtaatacatataaatgtcgtggacacaactattattttgaaaaaacccttacaactacagtagtattggagtaaatatacaatgcatttttatatacattactgaataattattattattatttatatcgtatttgtgctataacgcgactatctaggtatttgtatctcactgatagagaacatataaatatagactctattaaacagttgtgtaaaatatcaaatcctaatagatgtggatgtacggctttacatgagtacttttataattatagatcagtcaacggaaaatacaagtatagatacaacggttactatcaatattattcatctagcgattatgaaaattataatgaatattattatgatgattatgatagaactggtatgaacagcgagagcgatagtgagagtgataatatatcaatcaaaacagaatatgagaatgaatatgaattctatgatgaaacacaagatcaaagtacacaactagtaggttacgacattaaactcaaaaccaatgaggatgattttatggctatgatagatcagtgggtgtccatgattatatagatgaatcaattaataaagtagtatatggaagagagtctcacgtaagatggcgggatatatggcaagaacataatgatggcgtatacagtataggaaaggagtgcatagataatatatacgaagacaaccataccgtagacgaattctacaagatagacagcgtatcagatgtagatgacgcggaacacatatctccgataactaatgatgtatctacacaaacatgggaaaagaaatcagagttagatagatacatggaaatgtatcctcgtcatagatatagtaagcattctgtctttaagggattttctgacaaagttagaaaaaatgatttagacatgaatgtggtaaaagaattactttctaacggtgcatctctaacaattaaggatagcagtaataaggatccaataaccgtttattttcgaagaacgataatgaatttagaaatgattgatgaacgaaagtatatagtacactcctatctaaaaaattataaaaatttcgattatccatttttcaggaagttagttttgactaataaacattgtctcaacaattattataatataagcgacagcaaatatggaacaccgctacatatattggcgtctaataaaaaattaataactcctaattacatgaagttattagtgtataacggaaatgatataaacgcacgaggtgaagatacacaaatgcgaactccattacacaaatatttgtgtaaatttgtatatcataatattgaatatggtatccgatactataatgaaaagattatagacgcatttatagagttaggagccgatctaactattccaaatgacgatggaatgataccagtagtttactgtatacactcaaatgccgaatatggttataacaatattactaacataaagataatacgtaaactacttaatcttagtagacgtgcgtcacataatctatttagagatcgagtcatgcacgattatataagtaatacatatattgatcttgagtgtttagatattattagatcgttggatggattcgatatcaatggttactttgaaggacgtacaccacttcattgcgctatacaacataacttcactcagattgctaagtacttattagatcgaggagctgatatagtcgtacccaacacattgattatacatcagtacatacagtaaatagcatagatatggaggaggatacaaatatttcaaataaagttatgagatacgacactgtcaataatatatgggaaacattacctaacttctggactggaactataaatccaggcgtggtctcgcataaagatgatatatatgttgtatgcgacatcaaagatgaaaaaaatgttaaaacttgtatatttagatataacacgaatacgtataacggatgggaattggtcacgacgacagaaagcagattatcagctctgcatactattctttataacaataccataatgatgttacattgttatgaatcgtatatgttacaagatacatttaatgtgtacactcgcgaatggaatcatatgtgtcatcaacattcgaatagttatatcatgtacaatatactacccatctactaaatataatagaataaaataaatgagtatgatcattttagataacgattgattttatcattaccgcttcattcttatattctttgcttacggaacctatatttagaaacatctactaacgattttttatgcttgcattattaatggtatgtaatatgattgattgtgtacgcaataccaatttgttaagtatgaatacggggtacaaacataaactgaagtttaacattatttatttatgatatatatcgttattgtttggtctataccatggatatctttaaagaactaatcttaaaacacacggatgaaaatgttttgatttctccagtttctattttatctactttatctattctaaatcatggagcagctggttctacagctgaacaactatcaaaatatatagagaatatgaatgagaatacacccgatgacaataatgacatggacgtagatattccgtattgtgcgacactagctaccgcaaataaaatatacggtagcgatagtatcgagttccacgcctccttcctacaaaaaataaaagacgattttcaaactgtaaactttaataatgctaaccaaacaaaggaactaatcaacgaatgggttaagacaatgacaaatggtaaaattaattccttattgactagtccgctatccattaatactcgtatgacagttgttagcgccgtccattttaaagcaatgtggaaatatccattttctaaacatcttacatatacagacaagttttatatttctaagaatatagttaccagcgttgatatgatggtgggtaccgagaataacttgcaatatgtacatattaatgaattattcggaggattctctattatcgatattccatacgagggaaactctagtatggtgattatactaccggacgacatagaaggtatatataacatagaaaaaaatataacagatgaaaaatttaaaaaatggtgtggtatgttatctactaaaagtatagacttgtatatgccaaagtttaaagtggaaatgacagaaccgtataatctggtaccgattttagaaaatttaggacttactaatatattcggatattatgcagattttagcaagatgtgtaatgaaactatcactgtagaaaaatttctacatacgacgtttatagatgttaatgaggagtatacagaagcatcggccgttacaggagtatttatgactaacttttcgatggtatatcgtacgaaggtctacataaaccatccattcatgtacatgattaaagacaccacaggacgtatactttttatagggaaatactgctatccgcaataaatataaacaaatagacttttatcacgtttatctatgtctaaatattacaaatagtaatagtataaactaaagctgataatacttaaaaaaataataatatcatttacaattaatagtataaactaaaaattaaacaaatcgttattataagtaatatcaaaatgatgatatacggattaatagcgtgtcttatattcgtgacttcatccatcgctagtccactttatattcccgttattccacccattacggaagataaatcgttcaatagtgtagaggtattagtttccttgtttagagatgaccaaaaagactatacggtaacttctcagttcaataactacactatcgataccaaagactggactatcggcgtactatccacacctgatggtttggatataccattgactaatataacttattggtcacggtttactataggtcgtgcattgttcaaatcagagtctgaggatattttccaaaagaaaatgagtattctaggtgtttctatagaatgtaagaagtcgtcgacattacttacttttttgaccgtgcgtaaaatgactcgagtatttaataaatttccagatatggcttattatcgaggagactgtttaaaagccgtttatgtaacaatgacttataaaaatactaaaactggagagactgattacacgtacctctctaatggggggttgcctgcatactatcgtaatggggtcgatggttgattattgattagtatattccttattcacacaaaaagaacatttttataaacatgaaaccactgtctaaatgtaattatgatcttgatttatagatgaagatcagcctttagaggattttaaccagtatgtttaatatgaaaaaaataaacataacatattttgagattaagcgctattgtgcttaattattttgctctataaactgaatatatagccacaattattgacgggcttgtttatgaccggcaatcatgaatttacagaaattatctctggctatatatcttactgcgacatgttcgtggtgttatgaaacatgcataagaaaaactgcgttgtatcatgacattcaattggagcatgtagaagacaataaagatagtgtagcgtcgctaccgtacaagtagtcaatcaaagagaacgtagtagattgttggctacatttaattggacagatatagctgagggtgttagaaatgagttcattaaaatatgtgatatcaacggaacatatttatataattatactattgctgttagtataattattgattccacggaagaactaccaacagttactccaattacaacaacatatgaaccttctacatataattatactatcgatgatagcactgttattactactgaagaactacaagtgactcctcatatggatctccatcgatgatacatgtattaaaatactttccgaataagtcttttaaatattgtattaattatgaaaaactatgctatgcgagtatgatgcaaagatgtttaatgatacgatactagattttatctctagcgagagatgtcgttagaatcatttatcataactacgtttaataataattcatcaacgaatatcgataacatgtgtcatttatacgttaaagtctgtccgtcttctctattgtttagactgtttgtagaatgctgtgatataaacaaactagtagaaggtacgactccgttacactgttatctaatgaatgaaggatttgaatcatctgttttaaaaaacctattaaaggagtatgtcatgaatacgtttaatgttcatgacatccattacacaaatatttaactcatgatgaagttgagaatgatatgctttctgatagtatagatagctttagctaatataaaaatatattaatccactatatattctagacttgatttaaaaccgataaactactacgtactgtataagttgttaagaaaaggagcagaccctaattatgcagatgatagaggtaatacttttcttcattacttctgcatctatatgtccacttatgagaaaacgtcatttaataagatgcatcgtgaaaagaaatttattaaagagttggtaaaatatgaaaccgaaagtaaataatataggaaatacacctctacataactacgtatctcaatatgatatcactctcattcctcatccacaacccattaaaaaaatggaaattaaagccctctattagcataaacggctacaggtctacctttacaatggcctttccttgtgcccagttcagaccctgtcattgccacgctactaaggactccctgaataccgtggccgacgtcagacattgtctgactgaatacatcctgtgggtttctcatagatggacccatagagaaactgcagggcctctctacaggcttctcatctctttcagaactgatgcaacggagctctttggtggtgagttgaaggattcacttccgtgggacaatatcgacaattgcgtggagatcattaaatgtttcatcagaaatgactccatgaaaaccgccgaagaacttcgtgcaatcattggactttgtactcaatcagctatcgtctctggaagagtcttcaacgataagtatatcgacatactacttatgctgcgaaagattctgaacgagaacgactatctcaccctcttggatcatatccgcactgctaaatactaaatctccttcatgctctctcactacactttttatcatcttatgaggaatgattgccttcatcatttttcgtgaaataggaataattagcaccagaatagctatggattgcacatgtattctatgtcgtctactggatgaagatgtgacgtacaaaaaaataaaactagaaattgaaacgtgtcacaacttatcaaaacatatagatagacgaagaaacaatgcgctacattgttacgtctccaataaatgcgatacagacattaagattgttcgactgttactctctcgcggagtcgagagacttcgtagaaacaacgaaggattaactccgctaggagtatacagtaagcatagatacgtcaaatctcaaattgtgcatctactgatatccagctattcgaattcctctaacgaactcaagtcgaatataaatgatttcgatctgtattcggataatatcgacttacgtctgctaaaatacctaattgtggataaacggatacgtccgtccaagaatacgaattatgcaatcaatagtctcggattggtggatatatacgtaacgacgcctaatccgagaccagaagtattgctatggcttcttaaatcagaatgttacagcaccggttacgtatttcgtacctgtatgtacaacagtgatatgtgtaagaactctcttcattactatatatcgtctcatagagaatctcaatctctatccaaggatgtaattaaatgtttgatcaataacaatgtttccatccatggcagagacgaaggaggatctttacccatccaatactactggtctttctcaaccatagatatagagattgttaaattattattaataaaggatgtggacacgtgtagagtatacgacgtcagccctatattagaggcgtattatctaaacaagcgatttagagtaaccccatataatgtagacatggaaatcgttaatcttcttattgagagacgtcatactcttgtcgacgtaatgcgtagtattacttcgtacgattccagagaatataaccactacatcatcgataacattctaaagagatttagacaacaggatgaatccatcgtacaagccatgttgataaactacttacattacggcgatatggtcgttcgatgcatgttagataacggacaacaactatcctctgcacgactactttgttaataataatctcgtcgatgtaaacgtcgtaaggtttatcgtggaaaatatggacacgcggctgtaaatcacatatctaacaatggccgtctatgtatgtacggtctgatattatcgagatttaataattgcgggtatcactgttatgaaaccatactaatagatgtatttgatatactaagcaagtacatggataatatagatatgatcgataatgagaataaaactctactatattacgcggtcgatgtcaataatatacaatttgcaaagcggttattggaatatggagcgagtgttacaacatcacgctcgataatcaatacggccatccagaaaagtagttacagaagagaaaacaaaacgaagctagttgatttattacttagctaccatcccactctagagactatgattgacgcatttaatagagatatacgctatctatatcctgaaccattatcggcatgtatcagatacgccttaatcatagatgatgattttccttctaaagtaagtatgatatcgccggtcatcataaggaactaaagcgctatagagtagacattaatagaatgaagaatgcctacatatcaggcgtctccatgtttgatatattatttaaacgaagcaaacgccacagattgagatacgcaaagaatccgacatcaaatggtacaaaaaagaactaacgtccatcattacagatactgtaaagaacagtgagaggatcgactccatagtggacaacattaatacagacgataacttgatttcgaaattacccatggagatactttattactccattaaataatttatcatggagcgataatgtcctgtttcatttgtttccatgacatattacaaaatcgattccgtccaagatgataaaaacatttaccggcatcataaacacggagtttattttatatgtctcgcataaacattactaaaaaaatatattgttcggttttctttcacatctttaattatgaaaaagtaaatcattatgagatggacgagattgtgagcatcgttcgcgacagtatgtggtacatacctaacgtatttatggacgacggtaagaatgaaggtcacgtttctgtcaacaatgtctgtcatatgtatttcacgttctttgatgtggatacatcgtctcatctgtttaagctagttattaaacactgcgatctgaataaacgaggtaactctccattacattgctatacgatgaatacacgatttaatccatctgtattaaagatattgttacaccacggcatgcgtaactttgatagcaaggatgaccactatcaatcgataacaagatctttgatatactaacggacaccattgatgactttagtaaatcatccgatctattgctgtgttatcttagatataaattcaatgggagcttaaactattacgttctgtacaaaggatccgaccctaattgcgccgacgaggatgaactcacttctcttcattactactgtaaacacatatccacgttctacaaaagcaattattacaagtcaagtcacactaagatgcgagccgagaagcgattcatctacgcgataatagattatggagcaaacattaacgcggttacacacttaccttcaacagtataccaaacatagtcctcgtgtggtgtatgctcttttatctcgaggatacgtaataatcttgattgtacacccatcatggaacgattgtgcaacaggtcatattctcataatgttactcaattggcacgaacaaaaggaagaaggacaacatctactttatctattcataaaacataatcaaggatacactctcaatatactacggtatctactagataggttcgacattcagaaagacgaatactataataccgcctttcaaaattgtaacaacaatgttgcctcatacatcggatacgacatcaaccttccgactaaagacggtattcgacttggtgtttgaaaacagaaacatcatatacaaggcggatgttgtgaatgacatcatccaccacagactgaaagtacctatgattaaatcgttgttctacaagatgtcagaattctctccctacgacgattactacgtaaaaaagatactagcctactgcctattaagggacgagtcattcgcggaactacatagtaaattctgtttaaacgaggactataaaagtgtatttatgaaaaatatatcattcgataagatagattccatcatcgtgacataagtcgccttaaagagattcgaatctccgacaccgacctgtatacggtatcacagctatcttaaagccatacattcagacagtcacatttcatttcccatgtacgacgatctcatagaacagtgccatctatcgatggagcgtaaaagtaaactcgtcgacaaagcactcaataaattagagtctaccatcgatggccaatctagactatcgtatttgcctccggaaattatgcgcaatatcatctaaacagtatgttgtacggaaagaaccattacaaatattatccatgatagaaagaaaatatctatatgattggagaagtaggaaacaggaacaagacgacgattactacattattaaatcatgaagtccgtattatactcgtatatattgtttctctcatgtataataataaacggaagagatatagcaccgcatgcaccatccgatggaaagtgtaaagacaacgaatacaaacgccataatttgtgtccgggaacatacgcttccagattatgcgaacacacaatgtacgccgtgtggttcgggtaccttcacatctcgcaataatcatttacccgcttgtctaagttgtaacggaagatgcgatcgtgtaacactactcacaatagaatctgtgaatgctctcccggatattattgtcttctcaaaggatcatccggatgcaaggcatgtgtttcccaaacaaaatgtggaataggatacggagtatccggagacgtcatctgttctccgtgtggtctcggaacatattctcacaccgtctcttccgcagataaatgcgaacccgtacccagaaatacctttaactatatcgatgtggaaattaatctgtatcccgtcaacgacacgtcgtgtactcggacgaccactaccggtctcagtgaatccatctcaacgtcggaactaactattactatgaatcataaagactgtaatcccgtatttcgtgatggatacttctctgtccttaataaggtagcaacttcaggtttctttacaggagaaaggtgtgcactctgaatttcgagattaaatgcaataacaaagattcttcctccaaacagttaacgaaagcaaagaatgatactatcatgccgcattcggagacagtaactctagcgtcgacatctatatactatatagtaataccaatactcaagactacgaaactgatacaatctcttatcatgtgggtaatgtagccatatgcccggtagttgcgatatacataaactgatcactaattccaaacccacccgctttttatagtaagtttttcacccataaatacaataattaatttctcgtaaaagtagaaaatatattctaatttattgcacggtaaggaagtagaatcataaagaacagtactcaatcaatagcaatcatgaaacaatatatcgtactggcatgcatgtgcctgccagtcttcagcaatcatcctcatcgtgtacggaagaagaaaacaaacatcatatgggaatcgatgttattatcaaagtcacaaagcaagaccaaacaccgaccgatgataagatttgccaatccgtaacggaaattacagagtccgagtcagatccagatcccgaggtggaatcagtcgaggatgtagatcctcctaccacttattactccatcatcggtggaggtctgagaatgaactttggattcaccaaatgtcctcagattaaatccatctcagaatccgctgatggaaagactgtgaggtgtctatcgacatcagatgtagcgaagaagagaaagacagcgacatcaagacccatccagtactcgggtctaacatctctcataagaaagtgagttacgaagatatcatcggttcaacgatcgtcgatacaaaatgcgtcaagaatctagagtttagcgttcgtatcggagacatgtgcaaggaatcatctgaacttgaggtcaaggatggattcaagtatgtcgacggatcggcatctgaaggtgcaaccgatgatacttcactcatcgattcaacaaaactcaaagcgtgtgtctgaatcgataactctattcatctgaaattggatgagtagggttaatcgaacgattcaggcacaccacgaattaaaaaagtgtaccggacactatattccggtttgcaaaacaaaaatgttcttaactacattcacaaaaagttacctctcgcgacttcttctttttctgtctcaatagtgtgatacgattatgacactattcctattcctattcctatttcctttcagggtatcacaaaaatattaaacctctttctgatggtctcataaaaaaagttttacaaaaatatttttattctctttctctctttgatggtctcataaaaaaagttttacaaaaatatttttattctctttctctctttgatggtctcataaaaaa

SEQ ID NO: 9 - DNA, 188046 bp, synthetic construct
  source 1..188046: mol_type = other DNA
agataaaatagaaactggagaaatcaaaacattttcatccgtgtgttttaagattagttctttaaagatatccatggtatagaccaaacaataacgataacgatatatatcataaataaataatgttaaatttcagtttatgtttgtaccccgtattcatacttaacaaattggtattacataccattaataatgcaagcataaaaaatcgttagtagatgtttctaaatataggttccgtaagcaaagaatataagaatgaagggtaatgataaaatcaatcgttatctaaaatgatcatactcatttattttattctattatattaacacatacatttttaacagcaacacattcaatattgtattgttatttttatattatttacacaattaacaatatattattagtttatattactgaattaataatataaaattcccaatcttgttataaacacacactgagaaacagcataaacacagaatccatcaaaaatgttgataaattatctgatgttgttgttcgctgctatgataatcagatcattcgccgatagtggtaacgctatcgaaacgacattgccagaaattacaaacgctacaacagatattccagctatcagattatgcggtccagagggagatggatattgtttacacggtgactgtatccacgctagagatatcgacggtatgtattgtagatgctctcatggttatacaggcattagatgtcagcatgtagtattagtagactatcaacgttcagaaaaaccaaacactacaacgtcatatatcccatctcccggtattgtgcttgtattagtaggcattattatgtgttgtctattatctgtttataggttcactcgacgaactaaactacctatacaagatatggttgtgccataatttttataaattttttttatgagtatttttacaaaaatgtataaagtgtatgtcttatgtatatttataaaaatgctaaatatgcgatgtatctatgttatttgtatttatctaaacaatacctctacctctagatattatacaaaaattttttatttcagcatattaaagtaaaatctagttaccttgaaaatgaatacagtgggtggttccgtatcaccagtaagaacataatagtcgaatacagtatccgattgagattttgcatacaatactagtctagaaagaaatttgtaatcatcttctgtgacgggagtccatatatctgtatcatcgtctagtttatcagtgtcccatgctatatttctgttatcatcattagttaatgaaaataactctcgtgcttcagaaaagtcaaatattgtatccatacatacatctccaaaactatcgcttatacgtttatctttaacgatacctatacctagatggttatttactaacagacattttccagatctattgactataactcctatagtttccacatcaaccaagtaatgatcatctattgttatataacaataacataactcttttccgtttttatcagtatgtatatctatattaacgtcgtcgttgtagtgaatagtagttattgatctattatatgaaacggatatgtctagaacagcaattgtcttacgtccagttaacactttcgttgatttaaagtctagagtctttgcaaacataatatccttatccgactttatatttcctgtagggtggtataattttattttgcctccacatatcggtgtttccaaatatattactagacaatattccatatagttattagttaagggtacccaattagaacacgtacgcttattatcatcatttggatcgtatttcataaaagttattgtactatcgatgtcaacacattctacattttttaatcgtctatatagtatttttctgatattttctataatatcagaattgtcttccatcggaagttgtatactatcggaatcagttacatgtttaaataattctctgatgtcattccttatacaatcaaattcattattaaacagtttaatagtctgtagacctttatcgtcgtaaatatccattgtcttattagttacgcttatttttatgtgttttacgttgctttattatattttataagaatgattgtttgacgaatcacgagaactattaagacacattattaggtatatattataaaaaagtttttgattacgatgttataagaggaaagaggacacattaacatcatacatcaattaactacattcttataacatcgtaatcaaaagaattgcaattttgatgtataacaactgtcaatgggttatggaattgtatattacatattatacggtatgttggtaacgacaaataccgatcggtaattgtctgccggtgtaatagaattatatatatctatctattacaccggccttgtatacataataataagttgtggtagtatgatctccatatttataatttaggactttgtattcagtatttttggaatcataaaaaataaaaaaaagttttactaatttaaaatttaaaaagtatttacatttttttcactgtttagtcgcggatatggaattcgatcctgccaaaatcaatacatcatctatagatcatgtaacaatattacaatacatagatgaaccaaatgatataagactaacagtatgcattatccgaaatattaataacattacatattatatcaatatcacaaaaataaatacacatttggctaatcaatttcgggcttggaaaaaacgtatcgccggaagggactatatgactaacttatctagagatacaggaatacaacaatcaaaacttactgaaactatacgtaactgtcaaaaaaatagaaacatatatggtctatatatacactacaatttagttattaatgtggttattgattggataaccgatgtgattgttcaatcaatattaagagggttggtaaattggtacatagctaataatacctatactccaaatacacccaataatacaacaaccatttctgagttggatatcatcaaaatactggataaatacgaggacgtgtatagagtaagtaaagaaaaagaatgtggaatttgctatgaagttgtttactcaaaacgattagaaaacgatagatactttggtttattggattcgtgtactcatatattttgcataacatgcatcaatatatggcataaaacacgaagagaaaccggtgcgtcggataattgtcctatatgtcgtacccgttttagaaacataacaatgagcaagttctataagctagttaactaataaataaaaagtttaatttgttgacgacgtatgtcgttattttttctcgtataaaagattaatttgattctaatataatctttagtattggataaatatcaattcaaattaattccattagattatatcataaataaaaatagtagcacgcactacttcagccaaatattcttttttgaaacgccatctatcgtagtgaggacacaagtgaacctataatgagcaaatttattagtatcggttacatgaaggactttacgtagagtggtgattccactatctgtggtacgaacggtttcatcttctttgatgccatcacccagatgttctataaacttggtatcctcgtccgatttcatatcctttgccaaccaatacatatagctaaactcaggcatatgttccacacatcctgaacaatgaaattctccagaagatgttacaatgtctagatttggacatttggtttcaaccgcgttaacatatgagtgaacacacccatacatgaaagcgatgagaaataggattttcatcttgccaaaatatcactagaaaaaatttatttatcaattttaaaggtataaaaaatacttattgttgctcgaatattttgtatttgatggtatacggaagattagaaatgtaggtattatcatcaactgattctatggttttatgtattctatcatgtttcactattgcgttggaaataatatcatatgcttccacatatattttattttgttttaactcataatactcacgtaattctggattattggcatatctgtgaataattttagctccatgatcagtaaatattaatgagaacatagtattaccacctaccattatttttttcatttcgttcaattcttgattgcaaagatctatataatcattatagcgttgacttatggactctggaatcttagacgatgtacaggcatctataatcatggcatatttaatacattgttttatagcatagtcgttatctacgatgttagatatttctctcaatgaatcaatcacacaatctaatgtaggtttatgacataatagcattttcagcagttcaatgtttctagattcgttgatggcaatggctatacatgtatatccgttatttgatctaatgttgacatctgaaccggattctagcagtaaagatactagagattgtttattatatctaacagccttgtgaagaagtgtttctcctcgtttgtcaatcatgttaatgtctttaagataaggtaggcaaatgtttatagtactaagaattgggcaagcataagacatgtcacaaagaccctttttgtatgtataagtgtagaaattataacatccatagttggatttacataggtgtccaatcgggatctctccatcatcgagataattgatggcatctcccttccttttttagtagatatttcatcgtgtaagaatcaatattaatatttctaaagtatccgtgtatagcctctttatttaccacagctccatattccaacatgcattccactaaagggatatcgatatcgccgaatgtcatatactcaattagtatatgttggaggacatccgagttcattgttttcaatatcaaagagatggtttccttatcatttctccatagtggtacaatactacacattatttcgtgcggctttccattctccaaaaacaatttgaccaaatctacatctttattgtatctataatcactatttagataatcagccataattcctcgagtgcaacatgttagatcgtctatatatgaataagcagtgttatctattcctttcattaacaatttaacgatgtctatatctatatgagatgacttaatataatattgaagagctgtacaatagtttttatctatagaagacggcttgattccgtgattaattagacatttaacaacttccggacgcacatatgctctcgtatccgactttgaatacagatgcaatacggtaccgcaatttcgtagttgataatcatcatacgcgtatcagtactcgtcctcataaagaacactgcagccattttctatgaacaaatcaataattttaggaacaggatcattgtcattacataattttctataactgaacgatggttttcacatttaacactcaagtcaaatccatgttctaccaacacctttatcaagtcaacgtctacatttttggatttcatatagctgaatatattaaagtcatttatgttgctaaatccagtggcttctagtagagccatcgctatatcctttaactttaacatgtctactatttgtgtattcttctaatggggtagctgtctccaatttttgcgtaatggattagtgccactgtctagtagtagtttgacgacctcaacattattacaatgctcattaaaaaggtatgcgtgtaaagcattattcttgaattggttcctggtatcattaggatctctgtctctcaacatctgtttaagttcatcgagagccacctcctcattttccaaatagtcaaacattttgactgaatgagctactgtgaactctatacacccacacaactaatgtcattaaatatcatgtcaaaaacttgtacaattattaataaaaataatttagtgtttaaattttaccagttccagattttacacctccgttaaccccactggacgatcctcctccccacattccaccgccaccagatgtataagttttagatcctttattactaccatcatgtccatggataaagacactccacatgccgccactactaccccctttagaagacatattaataagacttaagagttaagacaagtttaacaataaaattaatcacgagtaccctactaccaacctacactattatatgattatagtttctatttttacagtaccttaactaaagtctctagtcacaagagcaatactaccaacctacactattatatgattatagtttctatttttataggaacgcgtacgagaaaatcaaatgtctaatttctaacggtagtgttgataaacgattatcgtcaatggatacctcctctatcatgtcgtctattttcttactttgttctattaacttattagcattatatattatttgattataaaacttatattgcttattagcccaatctgtaaatatcggattattaacatatcgtttctttgtaggtttatttaacttgtacatcactgtaagcatgtccgtaccatttattttaatttgacgcatatccgcaatttctttttcgcagtcggttataaattctatatatgatggatacatgctacatgtgtacttataatcgactaatatgaagtacttgatacatattttcagtaacgatttattattaccacctatgaataagtacctgtgatcgtctaggtaatcaactgttttcttaatacattcgatggttggtaatttactcagaataatttccaatatcttaatatataattctgctatttctggaatatatttatctgccagtataacacaaatagtaatacatgtaaacccatattttgttattatattaatgtctgtgccattatctattaaccattctactaggctgacactatgcgacttaatacaatgataaagtatactacatccatgtttatctattttgtttatatcatcaatatacggcttacaaagttttagtatcgataacacatccaactcacgcatagagaaggtagggaataatggcataatatttattaggttatcatcattgtcattatctacaactaagtttccattttttaaaatatactcgacaactttaggatctctattgccaaatttttgaaaatatttatttatatgcttaaatctatataatgtagctccttcatcaatcatacatttaataacattgatgtatactgtatgataagatacatattctaacaatagatcttgtatagaatctgtatatcttttaagaattgtggatattaggatattattacgtaaactattacacaattctaaaatataaaacgtatcacggtcgaataatagttgatcaactatataattatcgattttgtgatttttcttcctaaactgtttacgtaaatagttagatagaatattcattagttcatgaccactatagttactatcgaataacgcgtcaaatatttcccgtttaatatcgcatttgtcaagataataatagagtgtggtatgttcacgataagtataataacgcatctctttttcgtgtgaaattaaatagtttatcacgtccaaagatgtagcataaccatcttgtgacctagtaataatataataatagagaactgttttacccattctatcatcataatcagtggtgtagtcgtaatcgtaatcgtctaattcatcatcccaattataatattcaccagcacgtctaatctgttctattttgatcttgtatccatactgtatgttgctacatgtaggtattcctttatccaataatagtttaaacacatctacattgggatttgatgttgtagcgtatttctctacaatattaataccatttttgatactatttatttctatacctttcgaaattagtaatttcaataagtctatatcgatgttatcagaacatagatattcgaatatatcaaaatcattgatatttttatagtcgactgacgacaataacaaaatcacaacatcgtttttgatattattatttttcttggtaacgtatgcctttaatggagtttcaccatcatactcatataatggatttgcaccactttctatcaatgattgtgcactgctggcatcgatgttaaatgttttacaactatcatagagtatcttatcgttaaccatgattggttgttgatgctatcgcattttttggtttctttcatttcagttatgtatggatttagcacgtttgggaagcatgagctcatatgatttcagtactgtagtgtcagtactattagtttcgatcagatcaatgtctagatctatagaatcaaaacacgataggtcagaagataatgaatatctgtacgcttctttttgtactgtaacttctcgttttgttagatgtttgcatcgtgctttaacatcaatggtacaaattttatcctcgctttgtgtatcatattcgtccctactataaaattgtatattcagattatcatgcgatgtgtatacgctaacggtatcaataaacggagcacaccatttagtcataacagtaatccaaaattttttaaagtatatcttaacgaaagaagttgtgtcattgttaggatttggtaaatcattgtctacggtgtatggtactagatcctcataagtgtatatatctagagtaatgtttaatttatcaaatggttgataatatggatcctcatgacaatttccgaagatggaaatgagatatagacacgcaataaatctaattgcggacatggttactccttaaaaaaatacgaataatcaccttggctatttagtaagtgtcatttaacactatactcatattaatccatggactcataatctctatacgggattaacggatgttctatatacggggatgagtagttctcttctttaactttatactttttactaatcatatttagactgatgtatgggtaatagtgtttgaagagctcgttctcatcatcagaataaatcaatatctctgtttttttgttatacagatgtattacagcctcatatattacgtaatagaacgtgtcatctaccttattaactttcaccgcatagttgtttgcaaatacggttaatcctttgacctcgtcgatttccgaccaatctgggcgtataatgaatctaaactttaatttcttgtaatcattcgaaataatttttagtttgcatccgtagttatcccctttatgtaactgtaaatttctcaacgcgatatctccattaataatgatgtcgaattcgtgctgtatacccatactgaatggatgaacgaataccgacggcgttaatagtaatttactttttcatctttacatattgggtactagttttactatcataagtttataaattccacaagctactatggaataagccaaccatcttagtataccacacatgtcttaaagtttattaattaattacatgttgttttatatatcgctacgaatttaaacagagaaatcagtttaggaaaaaaaattatctatctacatcatcacgtctctgtattctacgatagagtgctactttaagatgcgacatatccgtgtcatcaaaaatatactccattaaaatgattattccggcagcgaacttgatattggatatatcacaacctttgttaatatctacgacaatagacagcagtcccatggttccataaacagtgagtttatctttctttgaagagatattttgtagagatcttataaaactgtcgaatgacatcgcatttatatctttagctaaatcgtatatgttaccatcgtaatatctaaccgcgtctatcttaaacgtttccatcgctttaaagacgtttccgatagatggtctcatttcatcagtcatactgagccaacaaatataatcgtgtataacatctttgatagaatcagactctaaagaaaacgaatcggctttattatacgcattcatgataaacttaatgaaaaatgtttttcgttggatgaatagtatgtcttaataattgttattatttcattaattaatatttagtaacgagtacactctataaaaacgagaatgacataactaatcataactagttatcaaagtgtctaggacgcgtaattttcatatggtatagatcctgtaagcattgtctgtattctggagctattttctttatcgcattagtaagttcagaatatgttataaatttaaatcgaataacgaacatgactttagtaaagtcgtctatattaactcttttattttctagccatcgtaataccatgtttaagatagtatattctctagttactacgatctcatcgttgtctagaatatcacatactgaatctacatccaattttagaaattggtctgtgttacatatctcttctatattattgttgatgtattgtcgtagaaaactattacgtagaccattttctttataaaacgaatatatagtactccaattatctttaccgatatatttgcacacataatccattctctcaatcactacatctttaagattttcgttgttaagatatttggctaaactatataattctattagatcatcaacagaatcagtatatatttttctagatccaaagacgaactctttggcgtcctctataatattcccagaaaagatattttcgtgttttagtttatcgagatctgatctgttcatatacgccatgattgtacggtacgttatgataaccgcataaaataaaaatccattttcatttttaaccaatactattcataattgagattgatgtaatactttgttactttgaacgtaaagacagtacacggatccgtatctccaacaagcacgtagtaatcaaatttggtgttgttaaacttcgcaatattcatcaatttagatagaaacttatactcatcatctgttttaggaatccatgtattattaccactttccattatcccaggctatgtttcgtccatcatcattgcgtagagtaaataattcttttgtattcggtagttcaaatatataatccatgcatagatcggtaaagctattgtagatgtgatttttcctaaatctaatataaaactcgtttactagcaaacactttcctgatttatcgaccaagacacatatggtttctaaatctatcaagtggtggggatccatagttatgacgcagtaacatatattattacattcttgactgtcgctaatatctatatatttattgttatcgtattggattctgcatatagaacacataaccaatttatagtcgcgctttacattctcaaatctacagttaagagatttagaaaacattatatcctcggatgatgttatcactgtttctggagtaggatatattaaagtctttacagatttcgtccgattcaaataaattactaaataatatcccacattatcatctgttagagtagtatcattaaatctattatattttatgaaaaatatatcacttgctcacctctatatttcgtacatttttaaactgtttatataatatctctctgatatatttattgtgtcggtagatgataccgttacatttgaattaatggtgttccattttacaacttttaacaagttgaccaattcatttttaatagtatcaaacgctccatgattaaatattttaatagtatccattttatatcactacggacacaaagtagctgacataaaccattgtataatttttatgttttatgtttattagcgtacacattttggaagttccggctgccatgtatttcctggagagcaagtagatgatgaggaaccagatagtttatatccgtacttgcacttaaagtctacattgtcgttgtatgagtatgatcttttaaacccgctagacaagtatccgtttgatattgtaggatgtggacatttaacaatctgacacgtgggtggatcggaccattctcctcctgaacacaggacaccagagttaccaatcaacgaatatccactattgcaactataagttacaacgctcccatcggtataaaaatcctcgtatccgttatgtcttccgttggatatagatggaggggattggcatttaacagattcacaaataggtgcctcgggattccataccatagatccagtagatcctaattcacaatacgatttagattcaccgatcaaatgatatccgctattacaagagtacgttatactagagccaaagtctactccaccaatatcaagttggccattatcgatatctcgaggcgatgggcatctccgtttaatacattgattaaagagtgtccatccagtacctgtacatttagcatatataggtcccattttttgctttctgtatccaggtagacatagatattctatagtgtctcctatgttgtaattagcattagcatcagtctccacactattcttaaatttcatattaatgggtcgtgacggaatagtacagcatgatagaacgcatcctattcccaacaatgtcaggaacgtcacgctctccaccttcatatttatttatccgtaaaaatgttatcctggacatcgtacaaataataaaaaagcccatatatgtttgctattgtagaaattgtttttcacagttgctcaaaaacgatggcagtgacttatgagtttcatctttagtaaacatatcataatattcgatattacgagttgacatatcgaacaaattccaagtatttgattttggataatattcgtattttgcatctgctataattaagatataatcaccgcaagaacacacgaacatctttcctacatggttaaagtacatgtataattctatccatttgtcttccttaactatatatttgtatagataattacgagtctcataagtaattccagtaattgcatagatgtcaccatcgtactctacagcataaactatactatgatgtctaggcatgggagacttttttatccaacgatttttagtgaaacattctacatcgtttaatactacatatttttcatacgtggtataaactccacccattacatatatatcatcgtttacgaataccgacgcgcctgaatatctaggagtaattaagtttggaagtcttatccatttcgaagtgccgtgtttcaaatattctgccacacccgttgaaatagaaaattctaatcctcctattacatataactttccatcgttaacacaagtactaacttctgattttaacgacgacatattagtaaccgttttccattttttcgtttcaagatctacccgcgatacggaataaacatgtctattgttaatcatgccgccaataatgtatagacaattatgtaaaacatttgcattatagaattgtctatctgtattaccgactatcgtccaatattctgttctaggagagtaatgggttattgtggatatataatcagagtttttaatgactactatattatgttttataccattttgtgtcactggctttgtagatttggatatagttaatcccaacaatgatatagcattgcgcatagtattagtcataaacttgggatgtaaaatgttgatgatatctacatcgtttggatttttatgtatccactttaataatatcatagctgtaacatcctcatgatttacgttaacgtcttcgtgggataagatagttgtcagttcatcctttgataattttccaaattctggatcggatgtcactgcagtaatattgttgattatttctaacatcgacgcattatatagttttttaattccatattgtttagaaaagttaaacatccttatacaatttgtggaattaatattatgaatcatagtttttacacatatatctactacaggcgtaacatcaattattacggcagcaactagtatcatttctacattgtttatggtgatgtttatcttcttccagcgcatatagtctaatagcgattcaaacgcgtgatagtttataccattcaatataatcacttcatcatttatatggtgctcctgaatgcgtttaaaaaaattatacggagacgccgtaataatttccttattcacttgtataatttccccattgatagaaaatatcacgctttccattcttgaagtactataagtaattatagtataatgtaaacgtttatatattcaatatttttataaaaatcattttgacattaattcctttttaaatttccgtctatcatctatagaaacatgttctatgaatttataaaatgcttttacgtgtcctatcgtaggcgatagaaccgctaaaaagcctatcgaatttctacaaaagaatctgttatatggtatagggagagtataaaacattaaatgtccgtacttattaaagtattcagtagccaatcctaactctttcgaatacttattaatggctcttattctgtacgaatctatttttttgaacaacggacctagtggtatatcttgttctatgtatctaaaataatgtcttacgagatccgttagtttaatatccgcagtcatcttgtctagaatggcaaatctaactgcgggtttaggctttagtttagtttctatatctacatctatgtctttatccaacactaaaaatataatagctaatattttattacaatcatccggatattcttctacgatctcactaactaatgtttctttggttatactagtatagtcacgatcagacaaataaagaaaatcagatgatcgatgaataatacatttaaattcatcatctgtaagatttttgagatgtctcattaaaatattattagggtcagtactcattatcatatattggcagcagctattacttattttatttttctgtattttattatttttcaccatatagatcaatcattagatcatcaaaatacttttcaatcatcctaaagagtatggcgaacgaatcttcccatctaatttctgaacgttcaccaatgtctctagccactttggcactaatagcgatcattcgcttagcatcttctatattattaactggttgattcaatctatctagcaatggaccgtcagacagtgtcattctcatgttcttaatcaatgcacatacatcgccgtcatctaccaattcatccaacgacataagatttttaaaatcatcattataataggatggatcgccatcatttctccaaagaatatatctaataagtagagtcctcatgtttagtaatttaactattttagttaataactattttttatgttaaatcaagtagcaccactatgttaatacttattcatattttagtttttaggattgataatcaacataaaaattaatacatcatcaattttggaaatactttgtttccacgtagtcaatgaaacatttgagctcatcgtataggacgttctcgaataggacgtaattatatactggtttatatttgttcaagatagatacaaatccgataacttttttgacgaagtctacgggatccactttaaaagtgtcataccgggttctttttattcttttaaacagatcaatggtgtgatgttgattaggtcttttacgaatttgatacagaatagcgtttacgtatccaccatagtgatcaatcgccatttgttcgtatgtcataaattctttaattatatgacatgttgtattatttagttcatccttgttcatcgttaggaatctatccaaaatggcaattatactagaactataactgcgtcgttgtatacacatatcgatgtgtctgtttatacaatcaatgatattaggatccatgctactaccttcgggtaaaaatgtagcatcatatacctctagtacgttaggttcatcgttacccattgtagaggacgtcataatcgaattctaaaaaaatatattatttttatgttattttgttaaaaataatcatcgaatacttcgtaagatactccttcatgaacataatcagttacaaaacgtttatatgaagtaaagtatctacgatttttacaaaagtcaggatgcataagtacaaagtacgcgataaacggaataataatagatttatctagtctatctttttctatagctttcatagttagatacatggtctcagaagtcggattatgtaacatcagcttcgataaaatgattgggttatttattcttacacattcgctcatacatgtatgaccgttaactacagagtctacactaaaatgattgaacaatagatagtctaccattgcttcgtattcagatagtacagcgtagtacatggcatcttcacaaattatatcattgtctaatagatatttgacgcatcttatggatcccacttcaacagccatcttaaaatcagtagaatcatattgttttcctttatcattaataatttctagaacatcgtctctatcataaaagatacaaatattaactatttgatccgtaataacattgctagtagatagcaatttattaataagttgcgctggggtcaatgtcttaacaagaagggtaagaggactatctccgaatttgttttgtttattaacatccgttgatggaagtaaaagatttatgatgtctacattcttgactggtttagagcatacaatatggagaggtgtatttccatcatgatctggttttgagggactaattcctagtttcatcatccatgagattgtagaagcttttggattgtctgacataagatgtctatgaatatgatttttgccaaatttatccactatcctggcttcgaatccgatggacattatttttttaaacactctttctgaaggatctgtacacgccaacaacggaccacatccttcttcatcaaccgagttgttaatcttggctccataccgcaccaataaatttattctctctatgacttcatcatctgttcccgagagataatatagaggtgttttatgctgtttatcacatgcgttcggatctgcaccgtgtgccaacagcgtcgcaactattctattattgttaattttagaagctatatgtaatggataatttccatcatcgtccgtctcatttggcgagtatcctatatgaagaagttcttcaacaaatcgttcatctagtcctttaattccacaatacgcatgtagaatgtgataatgtccagaaggttcgattgcttgcagcatattcctaaatacatctaaatttttactattatacttggcataaagagatagataatactctgctgacataatgttgtctattgtagtataaaaattaatatttctatttctatttctatttctatatatttgcgacaatttactctctataacaaatatcataacttacttcttttatgtcaagaaagcactggtttagttcatccataaatgtcacgccataactaccgcgcataccatactcagaattacgataaagatatttatccttggggtgtaggtaatggggattaatctttgttggatcagtctctaagttaacacacgtcacacaggatccatttatagttatatcacatgatgatttatgatgaattgattccggaagatcactatcgtattttgtggttccacaattcatttccatacatgttattgtcacactaatattatgatgaactttatctagccgctgagtggtaaacaacagaacagatagtttattatctttaccaactccctcagccgccgctacaaatctctgatccgtatccatgatggtcatgtttatttctagtccgtatccagtcaacactatgttagcatttctgtctatatagctttcactcatatgacactcacccataatagtagaattaatgtcataatttacaccaatagtgagttcggcggcaaagtaccaataccggtaatcttgtcgaggaggacatatagtgttcttgtattcggcagaatacccgagagatacgacacaaaggagtaagactaatttgtaaaccatcttacacaatagtacgatgcaattagcaataagacaatggaaatctatctataacatataattattctatcaattttaccaattagttagtatagtgtttaacaaaaatgttggagaatctaattagtttttccgcgcataattgacgtacatgagtctgagttccttgtttttactaattatttcatccaatttattattcttgacaatatcgaggtcttttgtataggagtcagacttgtattcaacatgcttttctataatcatcttagctatttcggcatcatccaatagtacattttccagattaacagaatagatattaatgtcgtatttgaacagagcctgtagcatttcaaggtctttgttatctatagccaatttgatgtccggaatgaagagaagggaattgttagtgttggtagattccatatagtcaagcaagagaatcatcatatccacgtttccattttttatggagtcgtgaatgcaactgtatagaatagccaggtcaaaagtagatggtatctctgaaagaaagtatgatacaatacttacatcattaagcatgacggcatgataaaatgaagttttccatccagttttcccatagaacatcagtctccaatttttcttaacaaacagttttaccgtttgcatgttgccactatcaaccgcgtaatacaatgcggtgtttcctttgtcatcaaattgtgaatcatccattccactgaatagcaaaatctttgctattttggtatcttctaatgtggctgcctgatgtaatggaaattcattctctagaagatttttcaatgctccagcgttcaacaacgtacatactagacgcacgttattatcggctattgcataatacaaggcactatgtccatggacatccgccttaaatgcatctttgctagagagaaagcttttcagctgcttggacttccaagtattaattcgtgacagatccatgtctgaaacgagacgctaattagtgtataatttttcattttttataattttgtcatactgctccagaattaataatatctctaatagatctgattagtagatatatggctatcgcaaaacaacatatacacatttaataaaaataatattcattaaggagattcagattccaccgtacccatcaatataaataaaataatgattccttacaccgtacccataatattaataattatccttccaccgtaccaatcaatataaataaaataatgattccttacaccgtacccataaacaatattaaggagattccaccttacccataaacaatataaatccagtaatatcatgtctaatgatgaacacaaatggtgtattaaattccagttgttcaggagatgatctagccgtagctaccatgatagtagatgcctctgctacagttccttgttcgtcgacgtctatctttgcattctgaaacattttatagatatataatgggttcctagtcatatgtttaaacgacgccttatctggattaaacatactaggagccatcatttcggctatcgacttaatatccctcttattttcgatagaaaatctagggagtttaagattgtacactttattccctaattgagatgaccaatagtctaattttgcagccgtgatagaatctgtgaaatgagtcatattatcacctattgccaggtacatactaatattagcatccttatacggaaggcgcaccatatcatattcttcatcgtcgacggtgattgtatttccttgcaatttagtaactacgttcatcatgggaaccgttttcgtaccgtacttattagtaaaactagcattgcgtgttttagtgatatcaaacggatattgccacgtacctttaaaatatatagtattaatgattgcccatagagtattattgtcgagcatagtagaatctactacattagacataccggatctacgttctactatagaattaattttattaaccgcatctcgtctaaagtttaatctatataggccgaatctatgatattgttgataataagacggtttaatacatacagtactatcgacgaaactttgataagttagatcagtgtacgtatatttagatgttttcagcttagctaatcccgatattaattctgtaaatgctggacccagatctctttttctcaaatccatagtcttcaataattctactctagtattacctgatgcaggcaatagcgacataaacatagaaaacgaatagccaaacggcgagaagacaatattatcatcctcgtccccatcctgaatatttttatacgctaatataccggcattggtaaatccttgcagacgatatgcggacgccgtacacgctaacgatagtatcaataacgcaatcatgattttatggtattaataatttaccttatttttatgtttagtataaaaaattattgatgtctgcacatccttttgtaattgacatctatatatccttttgtataatcaactctaatcactttaacttttacttttttccctacaagtttatccctatatttaaaatatctatccatatgcatctgaacactctctgccaagatagctgcagagtgaggatagtcaaaaagatcaatatatagagcataatcattctcgtatactctgccctttattacatcgcccgcattgggcaacgaataacaaaatgcgagcatctcgttaacgggctcgtaaattgggataaaaattatgtttttattgttttatatctattttattccagatagtattcaggaatttctttttccggttgtatctcgtcgttgtatatatcatttgtgcattgtttcatattttttaatagtctacatcttttagtaggactagtatcgtacaattcatagctgtattttgaattccaatcacgcataaaaatatcttccaattgttgacgaagacctaatccatcatccggtgtaatattaatagatgctccacatgtatccgtaaagtaattccctgtccaatttgaggttcctatatacgccgttttatctgttaccatatatttggcatggtttaccctagaatatggaattggaggatcggcatccggtacaataaacagttttacttctatatctatgtttttagattttagcatagcgatagatcttaaaaagtttctcataataaacgaagatcgttgccagcaactaatcaatagcttaactgacacttgtctgtctatagcggctcttcttaattcatcttctatatacggccaaaacaaaattttacccgccttcgaataaataatagggataaagttcataacggatacataaacgaatttactcgcatttccgatacatgacaataaagcggttaaatcattagttctttccatagtacatagttgttgtggcgcagaagcaataaatacagaatgtggaacaccgcttacgttcatactaagaggatgatctgtattataatacgcaggataaaagtttttccaattatatggtagattgttaactccaagataccagtatacctcaaaaatttgagtgagatccgctgccaagttactattattgaagatagcaatacccaattccttgacctgagttagtgatctccaatccatgttagcgcttcctaaataaatatgtgtattatcggatatccaaaattttgtatgaagaactcctcctaggatatttgtaatatctatgtatcttacttcaactccggccatttgtagcgtttcaacatcctttaatggtttgttggatttattgacggctactctaacgcgtactcctcttttgggtaattgtataatctcatttaatattatcgtgccgaaattcgtacccacttcatccgataaactccaataaaaagatgatatatctagtgtttttgtggtattggatagaatttccctccacacgttaaatgtagacaaatatactttatcaaattgcatacctataggaatagtctctgtaatcactgcgattgttttatccggattcattttatttgttaaaaaaaataatatcacttcactctattaaaaatccaagtttctatttctttcataactgattttttaacttcgtccgtttccttatgaagatgatgtttggcaccttcataaatttttatttctctattacaatttgcatgttgcatgaaataatatgcacctgaaacatcactaatctcattgtttgttccctggagtatgagactaggggtgttaatcttgggaattatttttctaaccttgttggtagccttcaagacctgactagcaaatccagccttaattttttcatgattgaccaatggatcgtattggtatttataaacttcatccatatctctagatactgattctgggcatagctttccgactggtgcatttggtgtgaagcttcccataagtttggcagctagcatatttagtcttggaacagcttctgtattaactagaggagacattagaatcattgctgtaaataagtctggattctcataagcggccagtatagaaattgttgctcccatggaatgacccaataagaagactggaactcctggataagtagatttaatagtcaccacgtgctgtaccacatctctaacatacgtaccaaagtcatctatcatcattttttcaccattacttcttccatgaccaatatgatcatgtgagaatactaaaattcctaacgatgatatattttcagctagttcatcataacgtccagaatgttcaccagctccatgacttatgaatactaatgccttaggatatgtaataggtttccaatatttacaatatatgtaatcattgtccagattgaacatacagtttgcactcatgattcacgttatataactatcaatattaacagttcgtttgatgatcatattatttttatgttttattgataattgtaaaaacatacaattaaatcaatatagaggaaggagacggatactgtcttttgtgagatagtcatggcgactaaatcagattatgaggatgccgttttttactttgtggatgatgatgaactatgtagtcgtgactccatcatcgatctaatagatgaatatatcacgtggagaaatcatgttatagtgtttaacaaagatatcaccagttgtggaagactgtacaaggaattgatgaagttcgatgatgtcgctatacggtactatggaattgataaaattaatgagattgtcgagactatgagcgaaggagaccactacatcaatctcacagaagtccatgatcaggaaagtctattcgctaccataggaatatgtgctaaaatcactgaacattggggatacaaaaagatttcagaatctagattccaatcattgggaaacattacagatctgatgaccgacgataatataaacatcttgatactttttctagaaaaaaaattgaattgatgacatagtgttataacgcgtaattattatgttaatgcattcttattctatatccggtgttaaaaaaaattatcctatcatgtatttgagagtcttatatgtagcaaacatgatagctgtgatgccaataagctttagatattcacgcgtgctagtgttggggatggtattatctggcggtgaaatgtccgttatataatctacaaaacaatcatcgcatatagtatgcgatagtagagtaaacatttttatagtttctactggattcatacatcgtctacccaattcggttatgaatgaaattgtcgccaatcttacacccaaacccttgttatctattagtatagtattaacttcgttatttatgtcataaactgtaaatgattctgtagatgccatatcatacatgatattcatgtccctattataatcattattaactttatcacaatacatgttgataatatctatatatgatctagtttttgttggcaactgtctatacaagtcgtctaaacgttgtttactcatatagtattgaacagccatcattacatggtcccgttccgttgatagataatcgagtatgttagtggacttgtcaaatctatataccatattttctggaagtggatatacatagttgtgatcatcattatcgctagcctcatcttctatatccggtactataccattatctatatccggtactataccattatctatatccggtactataccattatctataccatcatctacatcatcatctacataatctactatattattatacataaacatcgacaacatactattgtccattatctaagtccagttgatccaaacccttgagctcctctatctgtactatctagagattgtacttcctccagttctggataatatatacgttgatagattagctgagctattctatctcccgtatttacattgaacgtacattttccattattaataagaatgactcctatgtttcccctataatcttcgtctattacaccacctcctatatcaatgccttttagtgacagtccagacctaggagctattctaccatagcagaacttaggcatggacatactaatatctgtcttaattaactgtctttctcctggagggatagtataatcgtaagcgctatacaaatcatatccggcagcacccggcgattgcctagtaggagatttagctctgttagtttccttaacaaatctaactcgtgagttaatattcatgttgctcataaaactaatattttatttcaaaattatttaccatcccatatattccatgaataagtgcgattattatacacttctatagtatctatatacgaaccacgataaaatcctcctatcaatagcagtttattatccactatgatcaattctggattatccctcggataaataggatcatctatcagattccatgtattgctgtattcgcaataaaattcagcatttctaccaaccaagaataaccttctaccgaacactaacgcgcatgatttataatgaggataataagtggatggtccaaactgccactgatcatgatcgggtagcaaatattctgtagttgtatccgtttcagaatgtcctcctattacgtatataacattgtttatagatgcgattgctggattacatctaggtttaagaagactcggcatattaacccaagaagtatccccatggaaccaacgctcgacagatgtgggatttggtagacctcctactacgtataatttattgttagcaggtaccccactagcgtacagtctgggactattcatcggaggaattggaatccaattgtttgatacacaatttaacgctatagcatggttatgtatttcattgttcatccatccaccgatgagatatactacttctccaacatgagtacttgtacacatatggaatatatctataatttgatccatattcataggatactctatgaatggatacctgtatgatttgcgtggtcgtttatcacaatgaaatattttggtacagtctagtatccattttacattatttatacctctgggtgaaagataatttgacctgattacatttttgataaggagtagcaaatttcctaatctatttcttcgcttcatataccacttaatgacaaaatcaactacataatcctcatctggaacatttagttcgtcgctttctagaataagtttcatagatagataatcaaaattgtctatgatgtcatcttccagttccaaaaagtgtttggcaataaagtctttagtatgacataagagattggatagtccgtattctatacccatcatgtaacactcgacacaatattcctttctaaaatctcgtaggataaagtttatacaagtgtagatgataaattctacagatgttaatatagaagcacgtaataaattgacgacgttatgactatctatatatacctttccagtatatgagtaaataactatagaagttagactgtgaatgtcaaggtctagacaaaccctcgtaactggatctttatttttcgtgtatttttgacgtaaatgtgtgcgaaagtaaggagataactttttcaatatcgtagaattgactattatattgcctcctatagcctcaataattgttttgaatttcttagtcatagacaatgctaatatattcttacagtacacagtatttacaaatattggcatttatgtttctttaaaagtcaacatctagagaaaaatgattatcttcttgagacataactcccattttttggtattcacccacacgtttttcgaaaaaattagtttttccttccaatgatatattttccatgaaatcaaacggattggtaacattataaatttttttaaatcccaattcagaaatcaatctatccgcgacaaattctatatatgttttcatcatttcacaattcattcctataagtttaactggaagagccgcagtaagaaattcttgttcaatggataccgcatctgttataatagatctaacggtttcttcactcggtggatgcaataaatgtttaaacatcaaacatgcgaaatcgcagtgcagaccctcgtctctactaattagttcgttggaaaacgtgagtccgggcattaggccacgctttttaagccaaaatatggacgcaaatgacccagaaaagaagattccttctactgcggcaaaggcaacaagtctctctccataactggcgctgtcatgtatccacttttgagcccaatcggccttcttttttacacaaggcatcgtttctatggcattaaagagatagtttttttcattactatctttaacataagtatcgatcaaaagactatacatttccgaatgaatgttttcaatggccatctgaaatccgtagaaacatctagcctcggtaatctgcacttctgtacaaaatcgttcagctaaattttcattcactattccgtcactggctgcaaaaaacgccaatacatgttttataaaatgtttttcgttgggtgttagtttattccaatcattgatatctttagatatatctacttcttccactgtccaaaatgatgcctctgcctttttatacatattccagatgtcatgatattggattgggaaaataacaaatctatttggatttggtgcaaggatcggttccataactaaattaacaatagtagtaaattttttttcagttatcatctatatgactgtatttggatcttttatacattgccattgcagctatcactacaataattacaagtattattgatagcattgttattagtactatcataattaaattatctacatccatgggtgctgaataatcgttattatcatcattttgtaattgtgacatcatactagataaatcatttgcgagattgttgttggaaactgacatggaggatgcgttagcattatcgttattattatttaacgcctcccattctgattcacaaatgttacgtgcgttcaacattttatggaaactataattttgtgaaaacaggtaacaagaaaactcttcatcgttcaaatttttaacaatagtaaaccgattaaacgtcgagctaatttctaacgctagcgactctgttggatatggatttccagatatatatcttttcagctcccctacgtatctataatcatctgtaggaaatggaatgtatttccatctatctagtgttcctaatatcatatatggtggtgtagtagaaccattaagtgtgaaagattttatttcgcatcgtattttaacttcgcaataagattttgttagataacgcacactaccattcaaatcaatgatattagcctttacagatatattcatagtagtcgtgactatgactccatcttttagatgcgatactcccttgtatgtaccagaatcttcgtacctcaaactcgatatatttaaacaagttaatgagatattgacgcgttttatgaatgacgatatatatccagaagtttcatcctctgtggctagcgctataaccttatcattataataccaaagagtatgattaatatgtgatacgtcagtgtgggtacaaatatgtacattatcgtctacgtcgtattcgatacatccgcatacacccaacagatataaaatgataaatactctaacaacgttcgtacccatattgatgcggcttaatacatgttttgatttcaatttattgtaaaaaaagaatcggttttatacggttcgatattcttattctcgtctatcatctccacacagtcaaatccgtggttagcatgcacctcatcaaccggtaatagactatcggactcttctatcattataactcgagaatatttaatttgctcattattaatcaagtcaattatcttatttttaacaaatctgagtattttactcattttttataaaaacttttagaaatatacagactctatcgtgtgtctatatcttctttttatatccaatgtatttatgtctgatttttcttcatttatcatatataatggtccaaattctacacgtgcttcgaattcatccagatcattaatgttcttataatcgtaatatccttctcctcccgcttctacatcttccttcttattcttattcttattcttgtcacagaatctaccacaacaggatcccatgacgagcgtcatattaaactaattcattttcaattataatatactgattagtaatgaccattaaataaaaatattcttcataaccggtaagaaagtgaaaagttcacattgaaactatgtcagtcagtagttatacatcatgaaatgatgatatatatattctctattttggcggaggattatatgatataattcgtggataatcattcttaagacacatttcttcattcgtaaatcttttcacgttaaatgagtgtccatattttgcaatttcttcatatgatggcggtgtacgtggacgatgctgctcctgttcttgttgtggtcgccgactgtcgtgtttgcgtttagatccctccattatcgcgattgcgtagatggagtactatttttataccttgtaattaaatttttttattaattaaacgtataaaaacgttccgtatctgtatttaagagccagatttcgtctaatagaacaaatagctacggtaaaaataactagaataatcgctacacccactagaaaccacggatcgtaatacggcaatcggttttcgataataggtggaatgtatattttatttaaggacttaacaattgtctgtaaaccacaatttgcttccgcggatcctgtattaactatctgtaaaagcatatgttggccgggcggagccgaacattctccgatatccaatttctgtatatctataatgttattaacctccgcatacgcattacagttcttttctagcttggataccgcactaggtaaatcatttaggtctattcctatttcctcagcgatagctcttctatccttttccggaagcaatgaaatcacttcaataaatgattcaaccatgagtgtgaaactaagtcgagaattactcatgcatttgttagttattcggagcgcgcaatttttaaactgtcctataacctctcctatatgaatagcacaagtgacattagtagggatagaatgttgagctaatttttgtaaataactatctataaaaagattatacaaagttttaaactctttagtttccgccatttatccagtctgagaaaatgtctctcataataaatttttccaagaaactaattgggtgaagaatggaaacctttaatctatatttatcacagtctgttttggtacacatgatgaattcttccaatgctgtactaaattctatatctttttcgatttctggatatgtttttaataaagtatgaacaaagaaatggaaatcgtaataccagttatgttcaactttgaaattgttttttattttcttgttaatgattccagccacttgggaaaagtcaaagtcgtttaatgcagatttaatacgttcattaaaaacaaactttttatcctttagatgaattattattggttcattggaatcaaaaagtaagatattatcgggtttaagatcagcgtgtaaaaagttgtcgcaacagggtagctcgtaaactttaatgtataacagagacatctgtaaaaagataaactttatatattgtaccaaagatttaaatcctaatttgatagctaactcggtatctactttatctgccgaatacagtgctaagggaaaaattataatgtttcctctttcgtattcgtagttagttctcttttcatgttcgaaaaagtgaaacatgcggttaaaatagtttataacattaatattactgttaataactgccgggtaaaaatgggatagtaatttcacgaatttgatactgtcctttctctcgttaaacgcctttagaaaaactttagaagaatatctcaatgatagttcctggccatccatagtttgtatcaataataacaacatatgaagaacccgtttatacagagtatgtaaaaatgttaatttatagtttaatcccatggcccacgcacacacgattaattttttttcgtctccctttagattattgtacagaaatttgggtactgtgaactccgcagtagtttccatgggactatataattttgtggcctcgaatacaaattttactacatagttatctatcttaaagactataccatatcctcctgtagatatgtgataaaaatcgtcgtttataggataaaatcgtttatccttctgttggaaaaaggatgaattaatgtaatcattctcttctatctttagtagtgtttccctattaaaattcttaaaataatttaacaatctaactgatggagcccaattttggtgtaaatctaattgggacattatattgttaaaatacaaacagtctcctaatataacagtatctgataatctatggggagacatccattgatattcaggggatgaatcattggcaacacccatttattgtacaaaaagccccaatttacaaacgaaagtccaggtttgatagagacaaacaattaactattttgtctctgtttttaacacctccacagtttttaatttctttggtaatgaaattattcactatatcagtatcttctttatctaccagagattttactaacttgataaccttggctgtctcattcaatagggtagtgatatttgtatgtgtgatattgatatctttttgaattgtttcttttagaagtgattctttgatagtgtcagcatacgaattacaataatgcagaaactcagttaacatgcaggaattatagtaagccaattccaattgttgcctgtattgtattagagtgtcaatatgtgcaatggtgtccttgcgtttctctgatagaatgcgagcagcgattttggcgttatcatttgacgatatttctggaatgatgaatcctgtttctactaactttttagtaggacaaagcgaaacaatcaagaagatagcttctcctcctatttgtggaagaaattgaactcctctagatgatctactgacgatagtatctccttgacagatattggaccgaattacagaagtacctggaatgtaaattcctgaaacgccctcattttttaaacagattgttgcagtaaatcccgcactgtgaccaagatagagagctcctttggtgaatccatctctatgtttcagtttaaccaaaaaacagtcagctggtctaaaatttccatctctatctaatacagcatccaacttgatgtcgggaaccataaccggtttaatgttatatgtaacattgagtaaatccttaagttcataatcatcactgtcatcagttatgtacgagccaaacaatgtttctaccggcatagtggatacgaagatgctatccatcagaatgtttccctgattagtgttttctatatagctattcttctttaaacgattttccaaatcagtaactatgttcatttttttaggagtaggacgcctagccagtatggaagaggattttctagatcctctcttcaacatctttgatctcaatggaatgcaaaaccccatggtgtaacaaccaacgataaaaataatattgtttttcactttttataattttaccatctgactcatggattcattaatatctttatacgagctactaatgtacaattctttataactgaactgagatatatacatttgatctatggtttccatgattgagtaaatgaatgctctgcaataactaatggcaaatgtatagaacaacgaaattatactagagttgttaaagttaatattttctatgagctgttccaataaattatttgttgtggctgcgttcaagtcataaatcatcttgatactatccagtaaacagtctttaagttctggaatattatcatcccattgtaaagcccctaattcgactatcgaatatcctgctctgatagcagtttcaatatcgacggacgtcaatactgtaataaaggtggtagtattgtcatcatcgtgataaactacgggaatatggtcgttagtaggtacggtgactttacacaacgcgatatataactttccttttgtaccatttttaacgtagttgggacgtcctgcaggatattgttttgaagaaatgatatcgagaacagatttgatacgatatttgttggattcctgattattcactataatataatctagacagatagatgattcgataaatagagaagatatatcgttggtaggataatacatccccattccagtattctcggatactctattgatgacactagttaagaacatgtcttctattctagaaaatgaaaacatcctacacggactcattaaaacttctagcgctcctgattgtgtctcgaatgcctcaaacaaggatttcaaggatgccatagattctttgaccaatgatttaatattgcgtttagcatctgatttttttattaaatcgaatggtcggctctctgatttactaccccaatgataacaatagtcttgtaaagataagccgcaagaaaatttatacgcatccatccaaataactctagcaccatctgatgatattagtgtattattatagattttccatccacagttattgggccagtatactgttagcaacggtatatcaaatagattactcatgtaacctactagaatgatagttcgtgtactagtcataatatctttaatccaatctaagaaatctaaaattagatcttttacactgttaaagttaacaaaggtattacccgggtacgtggatatcatatatggtattggtccattatcagtaatagctccataaactgatacggcgatggtttttatatgtgtttgatctaacgaggaagaaattcgcgcccacaattcatctctagatatgtatttaatatcgaacggtaacacatcaatctcgggacgcgtatatgtttctaaattcttaatccaaatataatgatgacctatatgccctattatcatactgtcaactatagtatacctagagaacttacgatacatctgtttcctgtaatcgttaaattttacaaatctataacatgctaaaccttttgacgacagccattcattaatttctgatatggaatctgtattctcgataccgtatcgttctaaagccagtgctatatctccctgttcgtgggaacgctttcgtataatatcgatcaatggataatctgaagtttttggagaataatatgactcatgatctatttcgtccataaacaatctacacataggaattggaggcgatgatcttaattttgtgcaatgagtcaatcctataacttctaatcgtgtaatattcatcatcgacataacactatctatgttatcatcgtatattagtataccacgaccttcttcatttcgtgccaaaatgatatacagtcttaaataattacgcaatatctcaatagtttcataattgttagctgttttcatcaaggtttgtatcctgtttaacatgatggcgttctataacgtctctattttctatttttaattttttaaatttttaacgatttactgtggctagatacccaatctctctcaaatatttttttagcctcgcttacaagctgtttatctatactattaaaactgacgaatccgtgattttggtaatgggttccgtcgaaatttgccgaagtgatatgaacatattcgtcgtcgactatcaacaattttgtattattctgaatagtgaaaaccttcacagatagatcattttgaacacacaacgcgtctagacttttggcggttgccatagaatatacgtcgttcttatcccaattaccaactagaagtctgatcttaactcctctattaatggctgcttctataatggagttgtaaatgtcgggccaatagtagctattaccgtctacacgtgtagtgggaactatggccaaatgttcaatatctatactagtcttagccgacttgagtttatcaataactacatcagtgtctagatctctagaatatcccaataggtgttctggagaatcagtaaagaacactccacctataggattcttaatatgatacgcagtgctaactggcagacaacaagccgcagagcataaattcaaccatgaattttttgcgctattaaaggctttaaaagtatcaaatcttctacgaagatctgtggccagcgggggataatcagaatatacacctaacgttttaatcgtatgaatagatcctccagtaaatgacgcatttcctacataacatctttcatcatctgacacccaaaaacaaccgagtagtagccccacattattttttttatctatgttaacagttataaaatttatatccgggcaataactttgtagctctcccagatttcttttccctcgttcatctagcaaaactattattttaacccctttttcagatgcctcttttagtttatcaaaaataagagctcccctagtagtactcataggattacaacaaaaagatgctatgtatatatatttcttggctagagtgataatttcgttaaaacattcaaatgtagtcaaatgatcggatctaaaatccatattttctggtagtgtttctaccagcctacattttgctcccgcaggtactgatgcaaatggccacatttagttaacataaaaacttatacatcctgttctatcaacgattctagaatatcatcggctatatcgctaaaattttcatcaaagtcaacatcacaacctaactcagttaatatattaagaagttccatgatttcatcttcgtctatttccatatccatatccattgtagattgttgactgattatcgagtttaaatcagtattaatacccaattcttcagaatacactcggtgtttcatcgtaaccctctatcagtaacgtatttaagttggtagattttcaattatgtatcaatatagcaacagcagttcttgctcctccttgattctagtatcctcttcattattttcttctacgtacataagcatgtccaatacgtttgacaacatgccgacgatggcggctgccacagatacgaatatgactaaaccgatgaccatttaaaaaccactctctagctttcacttaaacttatagatcattcttttagcacatgtataatataaaaacattattctatttcgaatttaggcttccaaaaatttttcatccgtaaaccgataataatatatatagacttgttaatggtcggaataaacagattaatgcttaaactatcgtcatcaccacgattagagatacaatacttacattctttttgctgtttcgaaactttatcaatacacgttaatacaaacccaggaaggagatattgaaactgaggctgttgaaaatgaaacggtgaatacaatagttcagataatgtaaaatcatgattccgtattctgatagtattagaactgttaatggatgcagatggaacgtatctaggtgtatctattttaacaaagcatcgatttgctaatatacaattatccttttgattaattgttattttattcatattcttaaaaggtttcatatttatcaattcttctacattaacaatttccatttttaatttatgcagccccgcaatactcctcattacgtttcattttttttctagaatatccattttgttcatttcggcacatagattatccaattgagaagtgcatttagtagttttgtatattttaagtttattgacgaatcgtcgaaaattagttatagttaacattttattatttgataccctgatattaatacccctgccgttactattatttataactgatgtaacccatgtaacattagaattaattatcgatagtaatgcatcaacgcttccaaaattgtctattataaactcaccgataatttttttattgcatgttttcatattcattaggattatcaaatctttaatcttcttacgattgtatgcgttgatattacaagacgtcattctaaaagacggaggatctccatcaaatgccagacaatcacgtacaaagtacatggaaataggttttgttctattgcgcatcatagattcatatagaactcccatagaaatactaatttgttttactctataaaatactaatgcatctatttcatcgttatgtataacgtctttccaagtgtcaaattccaaatttttttcattgatagtaccaaattcttctatctctttaactatttgcatagataggtaattacagtggtgtctacaagctgttttttgaaactgaatcgatgcatctagaagcgatgctacgctagtcacaatcaccgctttcatatttagaatatatgtatgtaaaaatatagtagaatttcattttgtttttttctatgctataaatgaattctcattttgcatctgctcatactccgttttatatcaataccaaagaaggaagatatctggttctaaaagccgttaaagtatgcgatgttagaactgtagaatgcgaaggaagtaaagcttcctgtgtactcaaagtagataaaccctcatcacccgcgtgtgagagaagaccttcgtccccgtccagatgcgagagaatgaataaccctggaaaacaagtcccgtttatgagaacggacgtgctacaaaatatgtttgctgctaatcgcgacaacgtggcgtcgagacttttgaactaaaatacaattatatctttttcgatattaataaatccgtgtcgcccgggttttttatctctttcagtatgtgaatagataggtattttatctctattcatcatcgaatttaagagatccgataaacattgtttgtattctcccgatgtcagcatctgatacaacaatatatgtgcacataaacctctggcacttatttcatgtaccttccccttatcactaaggagaatagtatttgagaaatatgtatacatgatattatcatgaattagatatacagaatttgtaacactctcgaaatcacacgatgtgtcggcattaagatctaatatatcgctcgataacacattttcatctagatacactagacattttttaaagctaaaatagtctttagtagtaacagtaactatgcgattattttcatcgatgatacatttcatcggcatattattacgcgtaccatcaaagactataccatgtgtatatctaacgtattctagcatagttgccatacgcgcattaaacttttcaggatctttggatagatcttccaatctatctatttgagaaaacatttttatcatgttcaatagttgaaacgttggatccactatatagatattatctataaagattttaggaactacgttcatggtatcctggcgaatattaaaactatcaatgatatgattatcgttttcatcttttatcaccatatagtttctaagatatgggattttacttaatataatattatttcccgtaataaattttattagaaatgccaaatctataagaaaagtcctcgaattagtttgaagaatatctatatcgccgtaccgtatatttggattaattagatatagagaatatgatccgtaacatatacaactcttattatggcgtctaagatattcttccatcaacttattaacatttttgactagggaagatacattatgacgtcccattacttttgccttgtctattaccgcgacgttcatagaatttagcatatctcttgccaattcttccattgatgttacattataagaaattttagatgaaattacatttggagctttaatagtaagaactcctaatatatccgtgtatgtggtcactaatacagattgtagttctataatcgtaaataatttacctatattatatgtttgagtctgtttagaaaagtagctaagtatacgatcttttatttctgatgcagatgtatcaacatcggaaaaaaatctttttttattcttttttactaacgatacaaatatgtctttgttaaaaacagttattttctgaatatttctagcttgtaattttaacatatgatattcgtttacactaggtattctgcctaaataggtttctataatctttaatgtaatattaggaagagtattctgatcaggattcctattcattttgaggatttaaaactctgattattgtctaatatggtctcaacgcaaactttttcacagagcgatagagtttttgataactcgtttttcttaagaaatataaaactactgtctccagagctcgctctatcttttattttatctaattcgatacaaactcctgatactggttcagaaagtaattcattaattttcagtcctttatagaagatagttaatatagatagtacaaaatcttcagttcttgataccgatcggattgatcctagaactagatatattaataaagtactcattaggcagtttatggcagcttgataattagatatagtatattccagttcatatttattagataccgcattgcccagattttgatattctatgaattcctctgaaaataaatctaaaataactagacattctattttttgtggattagtgtactctcttccctctatcatgttcactactggtgtccacgatgacaaatatctagagggaatataatatagtccataggatgccaatctagcaatatcaaataactgtaattttattcttctctcttcattatgaattaattcttgaggtataaacctaacacaaattatattattagacttttcgtatgtaatgtctttcatgttataagtttttaatcctggaatagaatctatcttaatgaggcttttaaatgcggagttctccaacgagtcaaaacataatactctgttgtttttcttatatacgatgttacgattttcttctttgaatggaataggtttttgaattagtttataattacaacataatagatacggaagtgtacaaatagtacgcggaaaaaacataatagctcccctgttttcatccatggttttaagtaaatgatcactggcttccttagtcaatggatattcgaacattaaccgtttcatcatcattggacaaaatccatatttcttaatgtaaagagtaatcaaatcattgtgtttattataccatcttgttgtaaatgtgtattctgttatcggatctgctcctttttctattaaagtatcgatgtcgatctcgtctaagaattcaactatatcgacatatttcatttgtatacacataaccattactaacgtagaatgtataggaagagatgtaacgggaactgggtttgttgattcacaaactattctaatacatagttcttctgttaatacgtcttgtacgtaatctattatagatgccaagatatctatataattattttgtaatatgatgttaactatgtgatctatataagtagtgtaatatttcatgtatttggatatatgttccaactctgtctttgtgatgtctagtttcgtaatatctatagcatcctcaaaaaatatattcgcatatattcccaagtcttcagttctatcttctaaaaaatcttcagcgtatggaatataataatctattttgcctcttctgatgtcattaatgatatagtttttgacactattttccgtcaattgattcttattcactatatctaagaaacggatagcgtccctaggacgaactactgccattaatatctctattatagcttctggacataattcatctattataccagaattaatgggaactattccgtatctatctaacatagttttaagaaagtcagaatctaagacctgatgttcatatattggttcatacatgaaatgatctctattgatgatagtgactatttcattctctgaaaattggtaactcattctatacacgctttccttgttgataaaggatagtatatactcgatggaatttgtaccaacaaactgttctcttatgaatcgtatatcatcatctgaaataatcatgtaaggcatacacttaacaattagagacttgtctcctgttatcaatatactattcttgtgataatttatgtgtgaggcaaatttgtccacgttttttaattttgttatagtagatatcaaatccaatggagctacagttcttggcttaaacagatatagtttttctggaacgaattctacaacattattataaagaactttgggtagataagtgggatgaaatcctattttaattaatgcgatagccttgtcctcgtgcagatatccaaacgcctttgtgatagtatgacattcattgtctagaaacgctctacgaatatctgtaacagatatcatctttagagaatactagtcgcgttaatagtactaaaatttgtattttttaatctatctcaataaaaaaattaatatgtatgattcaatgtataactaaactactaactgttattgataactagaactagaatcagaatctaatgatgacgtaaccaagaagtgtatctacagccaatttagctgcattatttttagcatctcgtttagattttccatctgccttatcgaatactcttccgtcgatgtctacacaggcataaaatgtaggagagttactaggccccactgattcaatacgaaaagaccaatctctcttagttatttggcagtactcattaataatggtgacagggttagcatctttccaatcaataatttttttagccggaataacatcatcgaaagacttatgatcctctctcattgatttttcgcgggatgcatcatctattatggaatcagccatagcatcagcatccggcttatccgcctccattgtcgtaaaccaacgaggaggaatatcgtcggagctgtacaccatagcactacgttgaagatcgtacagagctttattaacttctcgcttctccatattaagttgtctagttagttgtacagcagtagctccttcgagtccaatgtttttaatagcctcacacacaatctctgcgtcagaacgttcgtcgatatagatcttagacatttttagagagaaatgacgcaaaaccagtaataaaactaatctattttatcatttttattcatcatcttctggtggttcgtcgttcctatcgaatgtggctctgattaacccgtcatctataggcgatgctggttctggagattctggaggagatggattattatctggaagaatctctgttatttccttgttttcatgtatcgattgcgttgtaacattaagattgcgaaatgctctaaatttgggaggcttgaagtgttgtttgcaatctctacacgcgtgtctaactaatggaggttcatcagcagctctagtttgaatcatcatcggtgtagtattcctacttttacagttaggacacggtgtattgtatttctcgtcgagaacgttaaaataatcgttgtaactcacatcctttattttatctatattgtattctactcctttcttaatgcattttataccgaacaagagatagcgaaggaattctttttcggtaccgctagtacccttaatcatgtcacatagtgttttatattccaaatttgtggcaatggacggtttatttctatacgatagtttgtttctggaatcctttgagtattctataccaatattattctttgattcgaatttagtttcttcgatattagattttgtattacctatattcttgatgtagtactttgatgatttttccatggcccattctattaagtcttccacgctggtattatcatccacatattgtgatagtaactctcggatatcagtagcggctaccgccattgatgtttgttcatttgatgagtaactactactaatgaatacattttccatttataacacttatgtattaactttgatcatttatattttttcattattatgttgatattaacaaaagtgaatatatatgttaataattatggtgtggtgtgtacggccacaatttcataatgagtggaagtcagtgtcctatgatcaatgacgatctatttagagttactttgaaaagaatgcatccactcaatagtgaggagtcgagtatgaaaatagataagaagaggacaaagtttcagaatagagccaaaatggtaaaagaaataaatcagacaataagagcagcacaaactcattacgagacattgaaacaaggatacctaaaatttaagagaatgattagaactgctactctaaaagatatagcaccatctattccaaaaattcagaaattttataaactattctcggacatttcagccatcagcaaagcatcacagaatccgagtaagatggtatatgctctactgctttacatgtttcccaatttgtttggagatgaccatagattcattcgttatagaatgcatccaatgagcaaaatcaaacacaagatcttctccccgttcaaacttaatcttattagaatattagtggaagaaagattctataataatgaatgcagagattataaatggagaataattggaacacaagttgataaaatattgatagctgaatctgctaaatatacaatagatgcaaggtatcgcctaagacctatatatagaatcaagggagaatctgaagaagataccctcttcatcaaacagatggtagagaaatgtgtaacgtctcaggaattggtggagaaagtgttgaagatactgtttaaagatttgttcaagagtggagaatacaaagattacagatacgatgatgatgtagacaatggattcattggattggacaaactaaaattaaacattgttcacgatatagttgaaccatgtatgcctgttcgtaggccagtggctaaggtactgtgtaaagaaatggtaaataaatactttgagaatcctctacatatcattggtaagaatctccaagagtgcattgactttgttagtgagtaggcatttcatcttttcctttctcaatactattcaacttgttaaattaataatggatagtttaaaatagttattagtagtaataagatagtttaaaatagttattagtagtaataagatagtttaaaatagttattagtagtaataagatagtttaaaatagtataaaatagataagtatttactctcttctataaaaatggattttattcgtagaaagtatcttatatacacagtagaaaataatatagattttttaaaggatgatacattaagtaaagtaaacaattttaccctcaatcatgtattagctctcaagtatctagttagcaatttcccccaacatgttattactaaggatgtattagctaataccaatttttttgttttcatacatatggtacgatgttgtaaagtgtacgaagcggttttacgacacgcatttgatgcacccacgttgtacgttaaagcattgactaagaattatttatcgtttagtaacgcaatacaatcgtacaaggaaaccgttcataaactaacacaagatgaaaaatttttagaggtagccgaatacatggaagaattaggagaacttataggggtaaattatgacttagttcttaatccattatttcacggaggggaacccatcaaagatatggaaatcatttttttaaaactatttaagaaaacagacttcaaagttgttaaaaaattaagtgttataagattacttatttgggcatacctaagcaagaaagatacaggcatagagtttgcggataatgatagacaagatatatatactctatttcaacaaactggtagaatagtccatagcaatctaacagaaacgtttagagattatatctttcccggagataagactagctattgggtgtggttaaacgaaagtatagctaatgatgcggatatcgttcttaatagacccgccattaccatgtatgataaaattcttagttatatatactctgagataaaacagggacgcgttaataaaaacatgcttaagttagtttatatctttgagcctgaaaaagatatcagagaacttctgctagaaattatatatgatattcctggagatatcctatctattattgatgcaaaaaacgacgattggaaaaaatattttattagtttttacaaagctaattttatcaacggtaatacatttattagtgatagaacgtttaacgaggacttattcagagttgttgttcaaatagatcccgaatatttcgataatgaacgaattatgtctttattctctacgagtgctgcggacattaaacgatttgatgagttagatattaataacagttatatatctaatataatttatgaggtgaacgatataacattagatacaatggatgatatgaagaagtgtcaaatctttaacgaggatacatcgtattatgttaaggaatacaatacatacctgtttttgaacgagacggatcccatggtcatagagaacggaatactaaagaaactgtcatctataaaatccaagagtagacgactgaacttgtttagcaaaaacattttaaaatattatttagacggacaattggctcgtctaggtcttgtgttagatgattataagggagacttgttagttaaaattataaaccatctcaagtctgtggaggatgtatcagcattcgttagattttctacagataaaaaccctagtattcttccatcgctaatcaaaactattttagctagttataatatttccatcatcgtcctatttcaaaagtttttaagagataatctatatcatgtagaagaattcttggataaaagcatccatctaaccaagacggataagaaatatatacttcaattgataaggcacggcagatcatagaacaaaccaaatatacatattaaaaattcacacatttttgataaatgggaactgctgcaacaattcagactcccaccaaattaatgaataaagagaatgcagaaatgattttggaaaaaattgttgatcatatagttatgtatattagtaacgaatcaagtgatgaaaataatcctgaatatattgattttcgtaacagatacggagactatagatctctcattataaaaagtgatcacgagtttgtaaagctatgtaaagatcatgccgagaaaagttctccagaaacacaacaaatgataatcaaacacatctacgaacaatatcttattccggtatctgaagtactattaaaacctatgatgtccatgggtgacataattacatataacggatgtaaagacaatgaatggatgatagaacaactctctaccctaaactttaacaatctccgcacatggaactcatgtagcataggcaatgtaacgcgtctgttttatacattttttagttatctgatgaaagataaactaaatatataagtataatcataatcccattctaatactttaacctgatgtattatgtatcacctgcatcttattagaatattaacctaactaaaagacataacataaaaactcattacatagttgataaaaagcggtaggatataaatattatggctgccgccgttccgcgttttgacgacgtgtacaaaaatgcacaaagaagaattctagatcaagaaacattttttagtagaggtctaagtagaccgttaatgaaaaacacatatctatttgataattacgcgtatggatggataccagaaactgcaatttggagtagtagatacgcaaacctagatgctagtgactattatcccatttcgttgggattacttaaaaagtttgagtttctcatgtctctatataaaggtcctattcccgtatatgaagaaaaaataaatactgaattcattgctaatggatctttctccggtagatacgtatcatatcttagaaagttttctgcccttccaacaaacgagtttattagttttttattattgacctccatccctatctataatatcttattctggtttaaaaacacacagtttgatattactaaacacacattattcagatacgtctatacagataatgccaaacacctggcgttggctaggtatatgtatcaaacaggagactataagcctttgtttagtcgtctcaaagagaattatatatttaccggtcctgttccgataggaatcaaagatatagatcaccctaatcttagtagagcaagaagtccatccgattatgagacattagctaatattagtactatattgtactttaccaagtatgatccagtattaatgtttttattgttttacgtacctgggtattcaattactacaaaaattactccagccgtagaatatctaatggataaactgaatctaacaaagagcgacgtaaaactgttgtaaattattttatgcttcgtaaaatgtaggttttgaaccaaacattctttcaaagaatgagatgcataaaactttattatccaatagattgactatttcggacgtcaatcgtttaaagtaaacttcgtaaaatattctttgatcactgccgagtttaaaacttctatcgataattgtttcgtatgttttaatatttacaagttttttggtccatggtccattaggacaaatatatgcaaaataatatcgttctccaagttctatagtctctggattatttttattatattcagtaaccaaatacatattagggttatctgcggatttataatttgaatgatgcattcgactcaacataaacaattctagaggagacgacctactatcaaattcggatcgtaaatctgtttctaaagaacggagaatatctatacatacctgattagaattcatccgtccttcagacaacatctcagacagtctggtcttgtatatcttaatcatgttcttatgaaacttggaaacatctcttctagtttcactagtacctttattaattctctcaggtacagattttgaattcgacgatgccgagtatttcatcgttgtatatttcttcttcgattgcataattagattcttatatacagcctcaaactctattttaaaattattaaacaatactctactattaatcagtcgttctaactcctttgctatttctatggacttatcgacatcttgactgtctatctctgtaaacacggagtcggtatctccatacacgctacgaaaacgaaatctgtaatctataggcaacgatgttttcactatcggattaatatctctatcgtccatataaaatggattacttaatggattggcaaaccgtaacataccgttagataactctgctccatttagtaccgattctagatacaagatcattctacgtcctatggatgtgcaactcttagccgaagcgtatgagtatagagcactatttctaaatcccatcagtccatacaccgagttggctactatcttgtacgtatattgcatggaatcatagatggccttttcagttgaactggtagcctgttttaacatctttttatatctggctctctctgccaaaaatgttctcaatagtctaggaatggttccttctatcgatctatcgaaaattgctatttcagagatgaggttcggtagtctaggttcacaatgaaccgtaatatatctaggaggtggatatttctgaagtaagagctgattatttatttcttcttccaatctattggtactaacgacgacaccgactaatgtttccggagatagatttccaaagatacacacattaggatacagactgttataatcaaagattaatacattattactaaacattttttgttttggagcaaataccttaccgccttcgtatggaaacttttgttttgtttctgatctcactaagatggttttagtttccaacaatagctttaacagtggacccttgatgactgtactcgctctatattcgaataccattgattgaggaagcacatatgttgacgcacccgcatctgtttttgtttctactccgtaatactcccacaaatactgacacaagcaagcatcatgaatacagtatctagccatatctaaagctatgtttagattataatccttatacatctgtgctagatcaacgtcatcctttccgaaagataatttatacgtatcatttgttaaagtgggacacgatagaacgaccttgaatccattttcccaaatatctttatgaattactttacatataatatcatcatcaaccgtcacataattacccgtggttaaaacctttgcgaatgcagcggctttgcctttagcgtccgtagtatcgtcaccgatgaacgtcatttctctaactcctctatttaatactttgcccatgcaactgaacgcgttcttggatatagaatccaatttgtacgaatccaatttttcagacttttgaatgaatgaatacagatcgaaaaatatagttccattattgttattaacgtgaaacgtagtattggccatgccacctactcccttgtgactagactgatttctctcataaatacagagatgtacagcttcctttttgtctggagatctaaagataatcttctctccggttaataactctagacgattagtaatatatctcagatcaaagttatgtccgttaaaggtaacgatatagtcgaacgttagttccaacaattgtttagctatttgtagcaaaactatttcagaacacagaactagttctcgttcataatccatttccatcagtgactgtatcctcaaacatcctctatcgacggcttcttgtatttcctgttccgttaacatctcttcattaatgagcgtaaacaataatcgtttaccgcttaaatcgatataacagtaacttgtatgcgagattggattaataaatacagaaggaaatttcttatcaaagtgacactctatatctagaaataagtacgatcttggaatatcgaatctaggtatttctttagcgaaacagttacgtggatcgtcgcaatgataacatccattgttaatctttgtcaaatattgctcgtccaacgagtaacatccgtctggagatatcccgttagaaatataaaaccaactaatattgagaaattcatccatggtggcattttgtatgttgcgtttctttggctcttctatcaaccacatatctgcgacggagcattttctatctttaatatctaaattataacttatcgtctcatcaatgtctatagttctcatctttcccatcggtctcgcattaaatggaggaggagccaatgactgatatatttcgtccgtcactacgtaataaaagtaatgaggaaatcgtataaatacggtctcgccatttcgacatctggatttcagatataaaaatctgttttcaccccgactttcgaaccaattaatgcaccgaacatccatttctagaatttagaaatatattttcatttaaatgaatcccaaacattggggaagagccgtatggaccattatttttatagtactttctcaagcgggtttagacggcaacatagaagcgtgtaaacgaaaactatatactatagtcagcacgcttccatgtcctgcatgtagacggcacgcgactatcgctatagaggacaataatgtcatgtctagcgatgatctgaattatatttattattttttcatcagattatttaacaatttggcatctgataccaaatacgcaatcgatgtgtcaaaggttaaacctttataaacttaacccattataaaacttatgattagtcacgactgaaataacggcgtgattattttttggtataattctacacggcatagtttctgtgactatgaattcaacacccgttatcttagtgaaatctttaacaaacagcaagggttcgtcaaagacataaaactcattgtttacgatcgaaatagatcccctatcacacttaaaataaaaaatatccttatcctttaccaccaaataaaattctgattggtcaatgtgaatgtattcacttaacagttccacaaatttatttattaactccgaggcacatacatcgtcggtattttttatggcaaactttactcttccagcatccgtttctaaaaaaatattaacgagttccatttatatcgtccaatattattgaaatgacgttgatggacagatgatacaaataagaaggtacggtacctttgtccaccatctcctccaattcatgctctattttgtcattaactttaatgtgtgaaaacagtactccacatgcttccatgacagtgtgtaacactttggatacaaaatgtttgacattagtataattgtccaagactgtcaatctataatagatagtagctataatatattctatgatggtattgaagaagatgacaaccttggcatattgatcatttaacacagacatggtatcaacagatagcttgaatgaaagagaatcagtaattggaataagcgtcttctcgatggagtgtccgtataccaacatgtctgatattttgatgtattccattaaattatttagttttttctttttattctcgttaaacagcatttctgtcaatggaccccaacatcgttgaccgattaagttttgattgatttttccatgtaaggcgtatctagtcagatcgtatagcctatccaataatccatcatctgtgcgtagatcacatcgtacactttttaattctctatagaagagcgacagacatctggagcaattacagacagcaatttctttattctctacagatgtaagatacttgaagacattcctatgatgatgcagaattttggataacacggtattgatggtatctgttaccataattcctttgatggctgatagtgtcagagcacaagatttccaatctttgacaatttttagcaccattatctttgttttgatatctatatcagacagcatggtgcgtctgacaacacagggattaagacggaaagatgaaatgattctctcaacatcttcaatggataccttgctattttttctggcattatctatatgtgcgagaatatcctctagagaatcagtatcctttttgatgatagtggatctcaatgacatgggacgtctaaaccttcttattctatcaccagattgcatggtgatttgtcttctttcttttatcatgatgtaatctctaaattcatcggcaaattgtctatatctaaaatcataatatgagatgtttacctctacaaatatctgttcgtccaatgttagagtatctacatcagttttgtattccaaattaaacatggcaacggatttaattttatattcctctattaagtcctcgtcgataataacagaatgtagataatcatttaatccatcgtacatggttggaagatgcttgttgacaaaatctttaattgtcttgatgaaggtgggactatatctaacatcttgattaataaaatttataacattgtccataggatactttgtaactagttttatacacatctcttcatcggtaagtttagacagaatatcgtgaacaggtggtatattatattcatcagatatacgaagaacaatgtccaaatctatattgtttaatatattatatagatgtagcgtagctcctacaggaatatctttaactaagtcaatgatttcatcaaccgttagatctattttaaagttaatcatataggcattgatttttaaaaggtatgtagccttgactacattctcattaattaaccattccaagtcactgtgtgtaagaagattatattctatcataagcttgactacatttggtcccgataccattaaagaattcttatgatataaggaaacagcttttaggtactcatctactctacaagaattttggagagccttaacgatatcagtgacgtttattatttcaggaggaaagaatctaacattgagaatatcggaattaatagcttccagatacagtgattttggcaatagtccgtgtaatccataatccagtaacacgagctggtgcttgctagacaccttttcaatgtttaatttttttgaaataagctttgataaagccttcctcgcaaattccggatacatgaacatgtcggcgacatgattaagtattgttttttcattattttctcaacaagttctcaataccccaatagatgatagaatatcacccaatgcgtccatgttgtctatttccaacaggtcgctatatccaccaatagaagttttcccaaaaaagattctaggaacagttctaccaccagtaatttgttcaaaataatcccgcaattcattttcgggtttaaattctttaatatcgacaatttcatacgctcctcttttgaaactaaacttatttagaatatccagtgcatttctacaaaaaggacatgtatacttgacaaaaattgtcactttgttattggccaacctttgttgtacaaattcctcggccattttaatatttaagtgatataaaactatctcgacttatttaactctttagtcgagatatatggacgcagatagctatatgatagccaactacagaaggcaaacgctataaaaaacataattacgacgagcatatttataaatatttttattcagcattacttgatatagtaatattaggcacagtcaaacattcaaccactctcgatacattaactctctcattttctttaacaaattctgcaatatcttcgtaaaaagattcttgaaactttttagaatatctatcgactctagatgaaatagcgttcgtcaacatactatgttttgtatacataaaggcgcccattttaacagtttctagtgacaaaatgctagcgatcctaggatcctttagaatcacatagattgacgattcgtctctcttagtaactctagtaaaataatcatacaatctagtacgcgaaataatattatccttgacttgaggagatctaaacaatctagttttgagaacatcgataagttcatcgggaatgacatacatactatctttaatagaactcttttcatccagttgaatggattcgtccttaaccaactgattaatgagatcttctattttatcattttccagatgatatgtatgtccattaaagttaaattgtgtagcgcttctttttagtctagcagccaatactttaacatcactaatatcgatatacaaaggagatgatttatctatggtattaagaattcgtttttcgacatctgtcaaaaccaattcctttttgcctgtatcatccagttttccatcctttgtaaagaaattattttctactagactattaataagactgataaggattcctccataattgcacaatccaaactttttcacaaaactagactttacaagatctacaggaatgcgtacttcaggtttcttagcttgtgattttttcttttgcggacattttctagtaaccaactcatctaccatttcattgattttagcagtgaaataagctttcaatgcacgggcactgatactattgaaaacgagttgatcttcaaattccgccatttaagtttaccaaacaacttttaaatacaaatatatcaatagtagtagaataagaactataaaaaaaataataattaaccaataccaaccccaacaaccggtattattagttgatgtgactgttttctcatcacttagaacagatttaacaatttctataaagtctgtcaaatcatcttccggagaccccataaatacaccaaatatagcggcgtacaacttatccatttatacattgaatattggcttttctttatcgctatcttcatcatattcatcatcaatatcaacaagtcccagattacgagccagatcttcttctacattttcagtcattgatacacgttcactatctccagagagtccgataacgttagccaccacttctctatcaatgattagtttcttgagtgcgaatgtaatttttgtttccgttccggatctatagaaaactacaggtgtgataattgccttggccaattgtctttctcttttactgagtgattctagttcaccttctatagatctgagaatggatgattctccagccgaaacatattctaccatggctccgtttaatttgttgatgaagatggattcatccttaaatgttttctctgtaatagtttccaccgaaagactatgcaaagaatttggaatgtgttccttgtgcttaatgtttccatagacggattctagaagttgatacaacataggactagccgcggtaacttttatttttagaaagtatccatcgcttctatcttgtttagatttatttttataaagtttagtctctccttccaacataataaaagtggaagtcatttgactagataaactatcagtaagttttatagagatagacgaacaattagcgtattgagaagcatttagtgtaacgtattcgatacattttgcattagatttactaatcgattttgcatactctataacacccgcacaagtctgtagagaatcgctagatgcagtaggtcttggtgaagtttcaactctcttcttgattaccttactcatgattaaacctaaataattgtactttgtaatataatgatatatattttcactttatctcatttgagaataaaaatgtttttgtttaaccactgcatgatgtacagatttcggaatcgcaaaccaccagtggttttattttatccttgtccaatgtgaattgaatgggagcggatgcgggtttcgtacgtagatagtacattcccgtttttagaccgagactccatccgtaaaaatgcatactcgttagtttggaataactcggatctgctatatggatattcatagattgactttgatcgatgaaggctcccctgtctgcagccatttttatgatcgtcttttgtggaatttcccaaatagttttataaactcgcttaatatcttctggaaggtttgtattctgaatggatccaccatctgccataatcctattcttgatctcatcattccataattttctctcggttaaaactctaaggagatgcggattaactacttgaaattctccagacaatactctccgagtgtaaatattactggtatacggttccaccgactcattatttcccaaaatttgagcagttgatgcagtcggcataggtgccaccaataaactatttctaagaccgtatgttctgattttatcttttagaggttcccaattccaaagatccgacggtacaacattccaaagatcatattgtagaataccgttactggcgtacgatcctacatatgtatcgtatggtccttccttctcagctagttcacaactcgcctctaatgcaccgtaataaatggtttcgaagatcttcttatttagatcttgtgcttccaggctatcaaatggataatttaagagaataaacgcgtccgctaatccttgaacaccaataccgataggtctatgtctcttattagagatttcagcttctggaataggataataattaatatctataattttattgagatttctgacaattactttgaccacatccttcagtttgagaaaatcaaatcgcccatctattacaaacatgttcaaggcaacagatgccagattacaaacggctacctgctagctttattctatacttaaaaaatgaaaataaatacaaaggttcttgagggttgtgttaaattgaaagcgagaaataatcataaattatttcattatcgcgatatccgttaagtttgtgtctagacaagcttaccaccatggtgagcaagggcgaggaggataacatggccatcatcaaggagttcatgcgcttcaaggtgcacatggagggctccgtgaacggccacgagttcgagatcgagggcgagggcgagggccgcccctacgagggcacccagaccgccaagctgaaggtgaccaagggtggccccctgcccttcgcctgggacatcctgtcccctcagttcatgtacggctccaaggcctacgtgaagcaccccgccgacatccccgactacttgaagctgtccttccccgagggcttcaagtgggagcgcgtgatgaacttcgaggacggcggcgtggtgaccgtgacccaggactcctccctgcaggacggcgagttcatctacaaggtgaagctgcgcggcaccaacttcccctccgacggccccgtaatgcagaagaagaccatgggctgggaggcctcctccgagcggatgtaccccgaggacggcgccctgaagggcgagatcaagcagaggctgaagctgaaggacggcggccactacgacgctgaggtcaagaccacctacaaggccaagaagcccgtgcagctgcccggcgcctacaacgtcaacatcaagttggacatcacctcccacaacgaggactacaccatcgtggaacagtacgaacgcgccgagggccgccactccaccggcggcatggacgagctgtacaagtagagatcttttttctgatatcaagcttggccagccataactccaggccgtttgtttcctccctgatctatgtatctagcggtgttattataaactctcaacattggaataataccgtttgatataccattggtaccggagatatagcttccactggcacgaatattactaattgatagacctattccccctgccattttagagattaatgcgcatcgttttaacgtgtcatagataccctctatgctatcatcgatcatgttaagtagaaaacagctagacatttggtgacgactagttcccgcattaaataaggtaggagaagcgtgcgtaaaccatttttcagaaagtagattgtacgtctcgatagctgagtctatatcccattgatgaattcctactgcgacacgcattaacatgtgctgaggtctttcaacgatcttgttgtttattttcaacaagtaggatttttccaaagttttaaaaccaaaatagttgtatgaaaagtctcgttcgtaaataataaccgagttgagtttatccttatatttgttaactatatccatggtgatacttgaaataatcggagaatgtttcccatttttaggattaacatagttgaataaatcctccatcacttcactaaatagtttttttgtttccttgtgtagatttgatacggctattctggcggctagaatggcataatccggatgttgtgtagtacaagtggctgctatttcggctgccagagtgtccaattctaccgttgttactccattatatattccttgaataaccttcatagctattttaataggatctatatgatccgtgtttaagccataacataattttctaatacgagacgtgattttatcaaacatgacattttccttgtatccatttcgtttaatgacaaacatttttgttggtgtaataaaaaaattatttaacttttcattaatagggatttgacgtacgtagcgtacaaaatgatcgttcctggtatatagataaagagtcctatatatttgaaaatcgttacggctcgattaaactttaatgattgcatagtgaatatatcattaggatttaactccttgactatcatggcggcgccagaaattaccatcaaaagcattaatacagttatgccgatcgcagttagaacggttatagcatccaccatttatatctaaaaattagatcaaagaatatgtgacaaagtcctagttgtatactgagaattgacgaaacaatgtttcttacatatttttttcttattagtaactgacttaatagtaggaactggaaagctagacttgattattctataagtatagatacccttccaaataatattctctttgataaaagttccagaaaatgtagaattttttaaaaagttatcttttgctattaccaagattgtgtttagacgcttattattaatatgagtaatgaaatccacaccgcctctagatatcgcttttatttccacattagatggtaaatccaatagtgaaactatctttttaggaatgtatggactcgcgtttagaggagtgaacgtcttgggcgtcggaaaggatgattcgtcaaacgaataaacaatttcacaaatggatgttaatgtattagtaggaaatttcttgacgctagtggaattgaagattctaatggatgatgttctacctatttcatccgataacatgttaatttccgacaccaacggttttaatatttcgatgatatacggtagtctctctttcggacttatatagcttattccacaatacgagtcattatatactccaaaaaacaaaataactagtataaaatctgtatcgaatgggaaaaacgaaattatcgacataggtatagaatctggaacattgaacgtattaatacttaattctttttctgtggtaagtaccgataggttattgacattgtatggttttaaatattctataacttgagacttgatagatattagtgatgaattgaaaattatttttatcaccacgtgtgtttcaggatcatcgtcgacgcccgtcaaccaaccgaatggagtaaaataaatatcattaatatatgctctagatattagtatttttatcaatcctttgattatcatcttctcgtaggcgaatgattccatgatcaagagtgatttaagaacatcctccggagtattaatgggcttagtaaacagtccatcgttgcaataataaaagttatccaagttaaaggatattatgcattcgtttaaagatatcacctcatctgacggagacaattttttggtaggttttagagactttgaagctacttgtttaacaaagttattcatcgtcgtttactattctatttaattttgtagttaatttatcacatatcacattaattgactttttggtccatttttccatacgtttatattcttttaatcctgcgttatccgtttccgttatatccagggatagatcttgcaagttaaatagaatgctcttaaataatgtcatttttttatccgctaaaaatttaaagaatgtataaacttttttcaaagatttaaaacttttaggtggagttctagtacacaatatcataaacaaactaataaacatcccgcattcagattccaacagctgattaacttccacattaatacagcctattttcgctccaaatgtacattcgaaaaatctgaataaaacatcgatgtcacaatttgtattatccaatacagaatgtttgtgattcgtgttaaaaccatcggagaaggaataaaaataaaaattattatagtggtggaattcagttggaatattgcctccggagtcataaaaggatactaaacattgttttttatcataaattacacatttccaatgagacaaataacaaaatccaaacattacaaatctagaggtagaacttttaattttgtctttaagtatatacgataagatatgtttattcataaacgcgtcaaatttttcatgaatcgctaaggagtttaagaatctcatgtcaaattgtcctatataatccacttcggatccataagcaaactgagagactaagttcttaatacttcgattgctcatccaggctcctctctcaggctctattttcatcttgacgacctttggattttcaccagtatgtattcctttacgtgataaatcatcgattttcaaatccatttgtgagaagtctatcgccttagataccttttctcgtagtcgaggtttaaagaaatacgctaacggtatactagtaggtaactcaaagacatcatatatagaatggtagcgcatctttaactcgtcagttagctctttcttttgatcgagttcgtcgctactattgggtctactcaggtgcccagactctactagttccaacatcataccgataggtatacaagacactctgccagcggttgtagatttatcatatttctctactacatatccgttacaatttgttaagaatttagatacatctatattgctacataatccagctagtgaatatatatgacataataaattggtaaatcctagttctggtattttactaattactaaatctgtatatctatccatttatcatggaaaagaatttacccgatatcttcttttttccaaactgcgttaatgtattctcttacaaatattcacaagatgaattcagtaacatgagcaaaacggaacgtgcaagtttctcattggcagtgtttccagtgataaaacatagatggcataacgcacacgttgtaaaacataaaggaatatacaaagttagtgcagaagcacgtggagaaaaagtatctcctccatcactaggaaaacctgtttacataaacctaactacgaggcaatatatatacagtgagtatgcaataagctttgaatgttatagttttctaaaatgtataacaaatacagaaatcaattcgttcgatgattatatattaagaggactattggaagcgggtaatagtttacagatattttccaattctgtgggtaaacggatagatactgtaggtgtactagggaacaagtatccgtttagtaaaattccattggcctcattaactccgaaagcacaacgagagatattttcagcgtggatttctcatagacctgtagttttaactggaggaaccggagtgggtaagacgtcacaggtacccaagttattgctttggtttaattatttatttgggggattctctactctagataaaatcactgactttcacgaaagaccagtcattctatctcttcctaggatagctttagttagattgcatagcaataccattttaaaatcattgggatttaaggtactaaatggatctcctatttctttacggtacggatctataccggaagaattaataaacaaacaaccaaaaaaatatggaattgtattttctacccataagttatctctaacaaaactatttagttatggcactcttattatagacgaagttcatgagcatgatcaaataggagatattattatagcagtagcgagaaagcatcatacgaaaatagattctatgtttttaatgactgccacattagaggatgacagagaacgtctaaaagtatttttacccaatcccgcatttatacatattcctggagatacactgtttaaaattagcgaggtatttattcataataagataaatccatcttccagaatggcatacatagaagaagaaaagagaaatttagttactgctatacagatgtatactcctcctgatggatcatccggcatagtcttcgtggcatccgttgctcaatgtcatgaatataaatcatatttagaaaagagattgccgtacgatatgtatattattcatggtaaggtcttagatatagacgaaatattagagaaagtgtattcatcacctaacgtatcgataattatttctactccttatttggaatccagcgttactatacgcaatgttacacacatttatgatatgggtagagtttttgttcctgctccttttggaggatcgcaacaatttatttctaaatctatgagagatcaacgaaaaggaagagtaggaagagttaatcctgggacatacgtctatttctatgatctgtcatacatgaagtctatacagcgaatagattcagaatttctacataattatatattatacgctaataagtttaatctaacactccccgaagatttgtttataattcctacaaatttggatgttctgtggcgtacaaaggaatatatagactcgttcgatattagtacagaaacatggaataaattattatccaattattatatgaagataatagagtatgcgaaactttatgtactaagtcctattctcgctgaggagttggataactttgagagaactggagaattaactagtacggtaaaagaagccattttatctctaaatttacgaattaagattttaaattttaaacataaagatgaggatacgtatatacacttttgtagagtattatttggtgtctataacggaacaaacgctactatatattatcatcgccctctaactggatatatgaatatgatttcagatactatatttgttcctgtagataataactaaaaatcaaactctaattaccacatctttttttagagatgaaaaattttccacatctccttttgtagacacgactaaacattttgcagaaaaacgtttattattatttagataatcgtatacttcatcagtgtagatagtaaatgtgaacagataaaaggtattcttgctcaataaattggtaaattccatagaatatattaatcctttcttcttgagatcccacatcatttcaaccaaagacgttttatccaatgatttacctcgtactataccacatacaaaactagattttgcagtgacgtcgtacctggtattcctaccaaacaaaattttacttttagttcttttagaaaattctaaggtagaatctctatttgccaatatgtcatctatggaattaccactagcaaaaaatgatagaaatatatattgatacatcgcagctggttttgatctactatactttaaaaacgaatcagattccataatggcctgtatatcatccgccgaaaaactatgttttacacgtattccttcggcatttctttttaatgatatatcttgtttagataatgataaagttatcatgtccatgagagacgcgtctccgtatcgtataaatatttcattagatgttagacgcttcattaggggtatacttctataaggtttcttaatcagtccatcattggttgcgtcaagaactactatcggatgttgttgggtatctctagtgttacacatggccttactaaagtttgggtaaataactatgatatctctattaattatagatgcatatatttcattcgtcaaggatattagtatcgacttgctatcgtcattaatacgtgtaatgtaatcatataaatcatgtgatagccaaggaaaattcaaatagatgttcatcatataatcgtcgctataattcatattaatactttgacattgactaatttgtaatatagcctcgccacgaagaaagctctcgtattcagtttcatcgataaaggataccgttaaatataactggttgccgatagtctcatagtctattaagtggtaagtttcgtacaaatacagaatccctaaaatattatctaatgttggattaatctttaccataactgtataaaatggagacggagtcataactattttaccgtttgtacttactggaatatatgaaggaataatctccgggcatgctggtaaagacccaaatgtctgtttgaagaaatccaatgttccaggtcctaatctcttgacaaaaattacgatattcgatcccgatatcctttgcattctatttaccagcatatcacgaactatattaagattatctatcatgtctattctcccaccgttatataaatcgcctccgctaagaaacgttagtatatccatacaatggaatacctcatttctaaaatagtattcgttttctaattctttaatgtgaaatcgtatactagaaagggaaaaattatctttgagttttccgttagaaaagaaccacgaaactaatgttctgattgcgtctgactccgtcgctgaattaatggatttacaccaaaaactcatataacttctagatgtagaagcattcgctaaaaaattagtagaatcaaaggatataagtagatgttccaacaagtgagcaattcccaagatttcatctatatcattctcgaatccgaaattagaaattcccaagtagatatcctttttcatccgatcattgatgaaaatacgaactttattcggtaagacgatcatttactaaggagtaaaataggaagtaatgttcgtatatcgttatcgtcgtataaattaaaggtgtgttttttgccattaagtgacattataattttaccaatattggaattataatataggtgtatttgagcactagaaacggtcgatgcatcggtaaatatagctgtatctaatgttctagtcggtatttcatcatttcgctgtctaataatagcgttttctctatctgtttccagcacagctgcctgaagtttattggtaggataatatgtaaaataataagaaatacatacgaataacaaaaataaaataagatataataaagatgccatttagagatctaattttgttcaacttgtccaaattcctacttacagaagatgaggaatcgttggagatagtatcttccttatgtagaggatttgaaatatcttacgatgacttaatatcgtactttccagataggaaataccataaatatatttctaaggtatttgaacatgtagatttatcggaggaattaagtatggaattccatgatacaactctgagagatttagtctatcttagattgtacaagtattccaagtatatacggccgtgttataaattaggagataatctaaaaggtatagttgttataaaggacagaaatatatatattagagaagcaaatgatgacttgatagaatatctcctcaaggaatacactcctcagatttatacatattctaatgagcgcgtccccatagctggttcaaaattaattctttgcggattttctcaagttacatttatggcgtatacaacgtcgcatataacaacaaataaaaaggtagatgttctcgtttccaaaaaatgtatagatgaactagtcgatccaataaattatcaaatacttcaaaatttatttgataaaggaagtggaacaataaacaaaatactcaggaagatattttattcggtaacaggtggccaaactccataggtagctttttctatttcggattttagaatttccaaattcaccagcgatttatcggttttggtgaaatccaaggatttattaatgtccacaaatgccatttgttttgtctgtggattgtatttgaaaatggaaacgatgtagttagatagatgcgctgcaaagtttcctattagggttccgcgctttacgtcacccaacatacttgaagcaccatcctttaaaaaaaatgataagatatcaacatggagtatatcatactcggattttaattcttctactgcctcactgacattttcacaaatactacaatacggtttaccgaaaataatcagtacgttcttcatttatgggtatcaaaaacttaaaatcgttactgctggaaaataaatcactgacgatattagatgataatttatacaaagtatacaatggaatatttgtggatacaatgagtatttatatagccgtcgccaattgtgtcagaaacttagaagagttaactactgtattcataaaatacgtaaacggatgggtaaaaaagggagggcatgtaaccctttttatcgatagaggaagtataaaaattaaacaagacgttagagacaagagacgtaaatattctaaattaaccaaggacagaaaaatgctagaattagaaaagtatacatcagaaatacaaaatgttaccggatttatggaagaagaaataaaggcagaaatgcaattaaaaatcgataaactcacatttcaaatatatttatctgattctgataacataaaaatatcattgaatgagatactaacacatttcaacaataatgagaatgttacattattttattgtgatgaacgagacgcagaattcgttatgtgtctcgaggctaaaacacatttctctaccacaggagaatggccgttgataataagtaccgatcaggatactatgctattcgcgtctgctgataatcatcccaagatgataaaaaacttaactcatctgtttaaatttgttccctcggcagaggataactatttagcaaaattaacggcgttagtgaatggatgtgatttctttcctggactctatggggcatctataacacccaccaacttaaacaaaatacaattgtttagcgattttacaatcgataatatagtcactagtttggcaattaaaaattattatagaaagactaactctaccgtagacgtgcgtaatattgttacgtttataaatgattacgctaatttagacgatgtctactcgtatgttcctccttgtcaatgcactgttcaagaatttatattctccgcattagatgaaaaatggaacgattttaaatcatcttatttagagagcgtgccattaccctgtcaattaatgtacgcgttagaaccacgtaaggagattgatgtttcagaagttaaaactttatcatcttatatagatttcgaaaatactaaattagatatcgatgttataaaatctatatcctcgatttttggatattctaacgaaaactgtaacacgatagtgttcggcatctataaggataatttactactgagtataaatagttcattttactttaacgatagtctgttaataaccaatactaaaagtgataatataataaatataggttactagattaaaaatggtgttccaactcgtctgctctacatgtggcaaagatatttctcatgaacgatataaattgattatacgaaaaaaatcattaaaggatgtactagtcagtgtaaagaacgaatgttgtaggttaaaattatctacacaaatagaacctcaacgtaacttaacagtgcaacctctattggatataaactaatatggatatggatccggttaattttatcaagacatatgcgcctagaggttctattatttttattaattatgccatatcattaactagtcatttgaatccatcgatagaaaaacatgtgggtatttattatggtacgttattatcggaacacctggtagttgaatcgacctatagaaaaggagttagaatagtcccattggatagtttttttgaaggatatattagtgcaaaagtatacatgttagagaatattcaagttatgaaaatagcagctgatacgtcattaactttactgggtattccatatggattcggtcatgatagaatgtattgttttaaattggtagctgaatgttataaaaatgccggtgttgatatatcgtctacacgaatattgggcaaagatatttttttgagccaaaacttcacagatgataatagatggataaagatatatgattctaataatttaacactttggcaaattgattaccttaaagggtgagttaatatgcataactactcctccgttattttttccctcgttctttttcttaacgttgtttgccatcactctcataatgtaaagatattctaaaatggtaaacttttgcatatcggacgcagaaattggtataaatgatgtaattgtattatttcccgtcaatggactagtcacggctccatcagttttatatcctttagagtatttctcactagtgtctagcattctagagcattccatgatctgtttatcgttgatattggccggaaagatagattttttattttttattatattactattggcaattgtagatataacttctggtaaatatttttctaccttttcaatctcttctattttcaagccggctatatattctgctatattgttgctagtatcaataccttttctggctaagaagtcatatgtggtattcactatatcagttttaactggtagttccattagcctttccacttctgcagaataatcagaaattggttctttaccagaaaatccagctactataataggctcaccgatgatcattggcaaaatcctatattgtaccagattaatgagagcatatttcatttccaataattctgctagttcttgagacattgatttatttgaggaatctagttggttctctagatactctaccatttctgccgcatacaataacttgttagataaaatcaatgttatcaaagtgtttaacgtggctagaatagtgggtttgcacgtattaaagaatgcggtagtatgcgtaaaccgttttaacgaattatatagtctccagaaatctgtggcgttacatacgtgagccgaatgacatcgaagattgtccaatatttttaatagctgctctttgtccattatttctatatttgactcgcaacaattgtagataccattaatcaccgattcttttttcgatgccggacaatagcacaattgtttagctttggactctatgtattcagaattaatagatatatctctcaatacagattgcactatacattttgaaactatgtcaaaaattgtagaacgacgctgttctgcagccatttaactttaaataatttacaaaaatttaaaatgagcatccgtataaaaatcgataaactgcgccaaattgtggcatatttttcagagttcagtgaagaagtgtctataaatgtagactcgacggatgagttaatgtatatttttgccgccttgggcggatctgtaaacatttgggctattatacctctcagtgcatcagtgttctaccgtggagccgaaaacattgtgtttaatcttccggtgtccaaggtaaaatcgtgtttgtgtagttttcacaatgatgccatcatagatatagaacccgatctggaaaataatctagtaaaactttccagttatcatgtagtaagtgtcgattgtaataaggaactgatgcctattaggacagatactactatttgtctaagtatagatcaaaagaaatcttacgtgtttaattttcacaagtatgaagaaaaatgttgtggtagaaccgtcattcatctagaatggttgttgggctttatcaagtgtattagtcagcatcagcatttggctattatgtttaaagatgacaatattattatgaggactcctggtaatactgatgcattttccagggaatattctatgactgaatgttctcaagaacttcaaaagttttctttcaaaatagctatctcgtctctcaacaaactacgaggattcaaaaagagagtcaatgtttttgaaactagaatcgtaatggataatgacgataacattctaggaatgttgttttctgacagagttcaatcctttaagattaacatctttatggcgtttttagactaatactttcaacgagataaatatgggtggtggagtaagcgttgcgctccctaaacgggatccgcctccgggagtacccactgacgaaatgttattaaacgtggataaaatgcatgacgtgatagctcctgctaagcttttagaatatgtgcatataggaccgctagcaaaagataaagaggataaagtaaagaaaagatatccagagtttagattagtcagcacaggacccggtaatctttcggcattattaagacaatcgtataatggaaccgcacccaattgctgtcgcacttttaaccgtactcattattggaagaaggatggaaagatatccgataagtatgaagatggtgcagtattagaatcgtgttggcccgacgtccacgacactggaaaatgcgatgttgatttattcgactggtgtcagggggatacgttcgatagaaacatatgccatcaatggatcggttcagcatttaataggagtgatagaacggcagagggtcaacaatcgttaataaatctgtacaataagatgcaaacattatgtactaaagatgctagtgtgccaatatgtgaatcatttttgcatcatttacgcgcacacaatacagaagatagccaagagatgatcgactatattttaagacaacagtccgcagattttaagcagaaatatatgagatgtagttatcccaccagagataagttagaagagtcactaaaatatgcggaacctcgagaatgttgggatccagagtgttcgaatgccaatgttaatttcttgctaacacgtaattataataatttagggctatgcaatattgtacgatgtaataccagcgtgaacaacttacagatggataaaacttcctcattaagattatcctgtggattaagcaatagtgatagattttctactgttcccgtcaatagagcaaaagtagttcaacataatattaaacattcgttcgacctaaaattgcatttgatcagtttattatctctcttggtaatatggatactaattgtagctatttaaatgggcgccgcggcaagcatacaaacgacggtgaatacactcagcgaacgtatctcgtctaaattagaacaagaagcgaacgctagtgctcaaacaaaatgtgatatagaaattggaaatttttatatccgacaaaaccatggatgtaacctcactgttaaaaatatgtgctccgcggacgcggatgctcagttggatgctgtgttatcagccgctacagaaacatatagtagtttaacaccggaacaaaaagcatacgtacctgctatgtttactgccgcgttaaacattcaaacgagtgtaaacactgttgttagagattttgaaaattatgtgaagcagacttgtaattctagcgcggtcgtcgataacaaattaaagatacaaaacgtaattatagatgaatgttatggagccccaggatcaccaacaaatttggaatttattaatacaggatctagcaaaggaaattgtgccattaaggcgttgatgcaattgacgactaaggccactactcaaatagcacctagacaagttgctggttcaggagttcaattttatatgatagttatcggtgttataatattggcagcgttgtttatgtactatgccaagcgtatgctattcacatccaccaatgataaaatcaaacttattttagcaaataaggaaaacgtccattggactacttacatggacacattctttagaacttctccgatggttatcgctaccacggatatacaaaactgaaaatatattgataatattttaatagattaacatggaagttatcgctgatcgtctagacgatatagtggaacaaaatatagcggatgaaaaatttgtagattttgttatacacggtctactagaacatcaatgtccctccatacttcggccattacttaggttgttgattgatatactattatttgttatagtaatttatatttttacggtacgtctggtacgtagaaattatcaaatgttgttggtgttggtggcgctagtcatcgcgttaactattttttattactttatactataatagtactagactgacttctaacaaacatctcacctgccataaataaattcttgatattaaagtcttctatttctaacactattccatctgtggaaaataatactctgacattatcgctaattgacacatcggtgagtgatatgcctataaagtaataatcttctttgggcacatataccagtgtaccaggttctaacaacctatttactggtgctccagtagcatactttttctttaccttaagaatatccatcgtttgcttagtcaatagcgataggtgattttttatcaaccactcgaaaaagtaattggagtgttcatatcctctacgggctattgtctcatgtccgtgtatgaaatttaagtaacacgactgtggtagatttgttctatagagccggttgccgcaaatagatagaactaccaatacatctgtacaaatgttaaacattaattgattaacagaaaaaacaatgttcgttctgggaatagaaaccagatcaaaacaaaattcgttagaatatatgccacgtttatacattgaatataaaataactacagtttgaaaaataacagtatcatttaaacatttaacttgcggggttaatctcacaactttactgtttttgaactgttcaaaatatagcatagatccatgagaaatacgtttagccgcctttaatagaggaaatcccaccgcctttctggatctcaccaacgacgatagttctgaccagcaactcatttcttcatcatccacctgttttaacatataataggcaggagatagatatccgtcattgcaatattccttctcgtaggcacacaatctaatattgataaaatctccattctcttctctgcatttattatcttgtttcggtggctgattaggctgtagtcttggtttaggctttggtatatcgttgttgaatctattttggtcattaaatctttcatttcttcctggtatatttttatcacctcgtttggttggatttttgtctatattatcgtttgtaacatcggtacgggtattcatttatcacaaaaaaaacttctctaaatgagtctactgctagaaaaccttatcgaagaagataccatattttttgcaggaagtatatctgagtatgatgatttacaaatggttattgccggcgcaaaatccaaatttccaagatctatgctttctatttttaatatagtacctagaacgatgtcaaaatatgagttggagttgattcataacgaaaatatcacaggagcaatgtttaccacaatgtataatataagaaacaatttgggtctaggagatgataaactaactattgaagccattgaaaactatttcttggatcctaacaatgaggttatgcctcttatcattaataatacggatatgactgccgtcattcctaaaaaaagtggtaggagaaagaataagaacatggttattttccgtcaaggatcatcacctatcttgtgtattttcgaaactcgtaaaaagattaatatttataaagaaaatatggaatccgcgtcgactgagtatacacctatcggagacaacaaggctttgatatctaaatatgcgggaattaatgtcctgaatgtgtattctccttccacatccatgagattgaatgccatttacggattcaccaataaaaataaactagagaaacttagtactaataaggaactagaatcgtatagttctagccctcttcaagaacccattaggttaaatgattttctgggactattggaatgtgttaaaaagaatattcctctaacagatattccgacaaaggattgattactataaatggagaatgttcctaatgtatactttaatcctgtgtttatagagcccacgtttaaacattctttattaagtgtttataaacacagattaatagttttatttgaagtattcgttgtattcattctaatatatgtattttttagatctgaattaaatatgttcttcatgcctaaacgaaaaatacccgatcctattgatagattacgacgtgctaatctagcgtgtgaagacgataaattaatgatctatggattaccatggatgacaactcaaacatctgcgttatcaataaatagtaaaccgatagtgtataaagattgtgcaaagcttttgcgatcaataaatggatcacaaccagtatctcttaacgatgttcttcgcagatgatgattcattttttaagtatttggctagtcaagatgatgaatcttcattatctgatatattgcaaatcactcaatatctagactttctgttattattattgatccaatcaaaaaataaattagaagccgtgggtcattgttatgaatctctttcagaggaatacagacaattgacaaaattcacagactctcaagattttaaaaaactgtttaacaaggtccctattgttacagatggaagggtcaaacttaataaaggatatttgttcgactttgtgattagtttgatgcgattcaaaaaagaatcctctctagctaccaccgcaatagatcctgttagatacatagatcctcgtcgcaatatcgcattttctaacgtgatggatatattaaagtcgaataaagtgaacaataattaattctttattgtcatcatgaacggcggacatattcagttgataatcggccccatgttttcaggtaaaagtacagaattaattagacgagttagacgttatcaaatagctcaatataaatgcgtgactataaaatattctaacgataatagatacggaacgggactatggacgcatgataagaataattttgaagcattggaagcaactaaactatgtgatgtcttggaatcaattacagatttctccgtgataggtatcgataaaaatatagtagaatttcattttgtttttttctatgctataaataggatccgataaagtgaaaaataattctaatttattgcacggtaaggaagtagaatcataaagaatcgaattgcggccgctctagaactagtggatcccccgggctgcaggaattcgatatcaagcttgccacaaccatggtgagcaagggcgaggagctgttcaccggggtggtgcccatcctggtcgagctggacggcgacgtaaacggccacaagttcagcgtgtccggcgagggcgagggcgatgccacctacggcaagctgaccctgaagttcatctgcaccaccggcaagctgcccgtgccctggcccaccctcgtgaccaccctgacctacggcgtgcagtgcttcagccgctaccccgaccacatgaagcagcacgacttcttcaagtccgccatgcccgaaggctacgtccaggagcgcaccatcttcttcaaggacgacggcaactacaagacccgcgccgaggtgaagttcgagggcgacaccctggtgaaccgcatcgagctgaagggcatcgacttcaaggaggacggcaacatcctggggcacaagctggagtacaactacaacagccacaacgtctatatcatggccgacaagcagaagaacggcatcaaggtgaacttcaagatccgccacaacatcgaggacggcagcgtgcagctcgccgaccactaccagcagaacacccccatcggcgacggccccgtgctgctgcccgacaaccactacctgagcacccagtccgccctgagcaaagaccccaacgagaagcgcgatcacatggtcctgctggagttcgtgaccgccgccgggatcactctcggcatggacgagctgtacaaggtgacagggggaatggcaagcaagtgggatcagaagggtatggacattgcctatgaggaggcggccttaggttacaaagagggtggtgttcctattggcggatgtcttatcaataacaaagacggaagtgttctcggtcgtggtcacaacatgagatttcaaaagggatccgccacactacatggtgagatctccactttggaaaactgtgggagattagagggcaaagtgtacaaagataccactttgtatacgacgctgtctccatgcgacatgtgtacaggtgccatcatcatgtatggtattccacgctgtgttgtcggtgagaacgttaatttcaaaagtaagggcgagaaatatttacaaactagaggtcacgaggttgttgttgttgacgatgagaggtgtaaaaagatcatgaaacaatttatcgatgaaagacctcaggattggtttgaagatattggtgaggcttcggaaccatttaagaacgtctacttgctacctcaaacaaaccaattgctgggtttgtacaccatcatcagaaataagaatacaactagacctgatttcattttctactccgatagaatcatcagattgttggttgaagaaggtttgaaccatctacctgtgcaaaagcaaattgtggaaactgacaccaacgaaaacttcgaaggtgtctcattcatgggtaaaatctgtggtgtttccattgtcagagctggtgaatcgatggagcaaggattaagagactgttgtaggtctgtgcgtatcggtaaaattttaattcaaagggacgaggagactgctttaccaaagttattctacgaaaaattaccagaggatatatctgaaaggtatgtcttcctattagacccaatgctggccaccggtggtagtgctatcatggctacagaagtcttgattaagagaggtgttaagccagagagaatttacttcttaaacctaatctgtagtaaggaagggattgaaaaataccatgccgccttcccagaggtcagaattgttactggtgccctcgacagaggtctagatgaaaacaagtatctagttccagggttgggtgactttggtgacagatactactgtgtttaaacgcgtggtacccgggatcccgaattctgtgagcgtatggcaaacgaaggaaaaatagttatagtagccgcactcgatgggacatttcaacgtaaaccgtttaataatattttgaatcttattccattatctgaaatggtggtaaaactaactgctgtgtgtatgaaatgctttaaggaggcttccttttctaaacgattgggtgaggaaaccgagatagagataataggaggtaatgatatgtatcaatcggtgtgtagaaagtgttacatcgactcataatattatattttttatctaaaaaactaaaaataaacattgattaaattttaatataatacttaaaaatggatgttgtgtcgttagataaaccgtttatgtattttgaggaaattgataatgagttagattacgaaccagaaagtgcaaatgaggtcgcaaaaaaactaccgtatcaaggacagttaaaactattactaggagaattattttttcttagtaagttacagcgacacggtatattagatggtgccaccgtagtgtatataggatctgctcccggtacacatatacgttatttgagagatcatttctataatttaggagtgatcatcaaatggatgctaattgacggccgccatcatgatcctattttaaatggattgcgtgatgtgactctagtgactcggttcgttgatgaggaatatctacgatccatcaaaaaacaactgcatccttctaagattattttaatttctgatgtgagatccaaacgaggaggaaatgaacctagtacggcggatttactaagtaattacgctctacaaaatgtcatgattagtattttaaaccccgtggcatctagtcttaaatggagatgcccgtttccagatcaatggatcaaggacttttatatcccacacggtaataaaatgttacaaccttttgctccttcatattcagctgaaatgagattattaagtatttataccggtgagaacatgagactgactcgagttaccaaattagacgctgtaaattatgaaaaaaagatgtactaccttaataagatcgtccgtaacaaagtagttgttaactttgattatcctaatcaggaatatgactattttcacatgtactttatgctgaggaccgtgtactgcaataaaacatttcctactactaaagcaaaggtactatttctacaacaatctatatttcgtttcttaaatattccaacaacatcaactgaaaaagttagtcatgaaccaatacaacgtaaagtatctagcaaagattttatgtctaaaaacagaaatagcaagagatccgtacgcagtaataaatagaaacgtactactgagatatactaccgatatagagtataatgatttagttactttaataaccgttagacataaaattgattctatgaaaactgtgtttcaggtatttaacgaatcatctataaattatactccggttgatgatgattatggagaaccaatcattataacatcgtatcttcaaaaaggtcataacaagtttcctgtaaattttctatacatagatgtggtaatatctgacttatttcctagctttgttagactagatactacagaaactaatatagttaatagtgtactacaaacaggcgatggtaaaaagactcttcgtcttcccaaaatgttagagacggaaatagttgtcaagattctctatcgtcctaatataccattaaaaattgttagatttttccgcaataacatggtaactggagtagagatagcagatagatctgttatttcagtcgctgattaatcaattaatagagatgagataagaacattataataatcaataatatatcttatatcttgtttagaaaaatgccaatattaaaatagctaacgctagtaatccaatcggaagccatttgatatctataatagggtatctaatttcctgattcagatagcggacagctatattctcggtagctactcgtttggaatcacaaacattatttacatctaatttactatctgtaatggaaacgtttcccaatgaaatggtacaatccgatacattgcatcttgatatatttttttttaaagaggctggtaacaacgcatcgcttcgtttacatggctcgtaccaacaataatagggtaatcttgtatctattcctatccgtactatgcttttatcaggatgaatacatttacatcgtatatcgtctttgttagcatcgcagaatgcataaatttgctcgtccgtcatgataaaaatttaaagtgtaaatataactattatttttatagttgtaataaaaagggaaatttgattgtataccttcggttctttaaaagaaactgacttgataaaaatggctgtaatctctaaggttacgtatagtctatatgatcaaaaagagattaatgctacagatattatcattagtcatgttaaaaatgacgacgatatcggtaccgttaaagatggtagactaggtgctatggatggggcattatgtaaaacttgtgggaaaacggaattggaatgtttcggtcactggggtaaagtaagtatttataaaactcatatagttaagcctgaatttatttcagaaattattcgtttactgaattatatatgtattcactgcggattattgcgttcacgagaaccgtattccgacgatattaacctaaaagagttatcgggacacgctcttaggagattaaaggataaaatattatccaagaaaaagtcatgttggaacagtgaatgtatgcaaccgtatcaaaaaattactttttcaaagaaaaaggtttgtttcgtcaacaagttggatgatattaacgttcctaattctctcatctatcaaaagttaatttctattcatgaaaagttttggccattattagaaattcatcaatatccagctaacttattttatacagactactttcccatccctccgttgattattagaccggctattagtttttggatagatagtatacccaaagaaaccaatgaattaacttacttattaggtatgatcgttaagaattgtaacttgaatgctgatgaacaggttatccagaaggcggtaatagaatacgatgatattaaaattatttctaataacactaccagtatcaatttatcatatatcacatccggcaaaaataatatgattagaagttatatcgtcgcccggcgaaaagatcagaccgctagatctgtaattggtcccagtacatctatcaccgttaatgaggtaggaatgcccgcatatattagaaatacacttacagaaaagatatttgttaatgcctttacagtggataaagttaaacaactattagcatcaaaccaagttaaattttactttaataaacgattaaaccaattaacaagaatacgccaaggaaagtttatcaaaaataaaatacatttattgcctggtgattgggtagaagtagctgttcaagaatatacaagtattatttttggaagacagccgtctctacatagatacaacgtcatcgcttcatctatcagagctaccgaaggagatactatcaaaatatctcccggaattgccaactctcaaaatgctgatttcgacggggatgaggaatggatgatattagaacaaaatcctaaagctgtaattgaacaaagtattcttatgtatccgacgacgttactcaaacacgatattcatggagcccctgtttatggatctattcaagatgaaatcgtagcagcgtattcattgtttaggatacaagatctttgtttagatgaagtattgaacatcttggggaaatatggaagagagttcgatcctaaaggtaaatgtaaattcagcggtaaagatatctatacttacttgataggtgaaaagattaattatccgggtctcttaaaggatggtgaaattattgcaaacgacgtagatagtaattttgttgtggctatgaggcatctgtcattggctggactcttatccgatcataagtcgaacgtggaaggtatcaactttattatcaagtcatcttatgtttttaagagatatctatctatttacggttttggggtgacattcaaagatctgagaccaaattcgacgttcactaataaattggaggccatcaacgtagaaaaaatagaacttatcaaagaagcatacgccaaatatctcaaagatgtaagagacgggaaaatagttccattatctaaagctttagaggcggactacgtggaatccatgttatccaacttgacaaatcttaatatccgagagatagaagaacatatgagacaaacgctgatagatgatccagataataacctcctgaaaatggccaaagcgggttataaagtaaatcccacagaactaatgtatattctaggtacttatggacaacagaggattgatggtgaaccagcagagactcgagtattgggtagagtcttaccttactatcttccagactctaaggatccagaaggaagaggttatattcttaattctttaacaaaaggattaacaggttctcaatattacttttcgatgctggttgcaagatctcaatctactgatatcgtctgtgaaacatcacgtaccggaacactggctagaaaaatcattaaaaagatggaggatatggtggtcgacggatacggacaagtagttataggtaatacgctcatcaagtacgccgccaattataccaaaattctaggctcagtatgtaaacctgtagatcttatctatccagatgagtccatgacttggtatttggaaattagtgctctgtggaataaaataaaacagggattcgtttactctcagaaacagaaacttgcaaaaaagacattggcgccgtttaatttcctagtattcgtcaaacccaccactgaggataatgctattaaggttaaggatctgtacgatatgattcataacgtcattgatgatgtgagagagaaatacttctttacggtatctaatatagattttatggagtatatattcttgacgcatcttaatccttctagaattagaattacaaaagaaacggctatcactatctttgaaaagttctatgaaaaactcaattatactctaggtggtggaactcctattggaattatttctgcacaggtattgtctgagaagtttacacaacaagccctgtccagttttcacactactgaaaaaagtggtgccgtcaaacaaaaacttggtttcaacgagtttaataacttgactaatttgagtaagaataagaccgaaattatcactctggtatccgatgatatctctaaacttcaatctgttaagattaatttcgaatttgtatgtttgggagaattaaatccaaacatcactcttcgaaaagaaacagataaatatgtagtagatataatagttaatagattatacatcaagagagcagaaataaccgaattagttgtcgaatatatgattgaacgatttatctcctttagcgtcattgtaaaggaatggggtatggagacattcattgaggacgaggataatattagatttactgtctatctaaatttcgttgaaccagaggaattgaatcttagtaagtttatgatggttcttccgggggcagccaacaagggaaagattagtaaattcaagattcctatctctgactatacgggatatgacgacttcaatcaaacaaaaaagctcaataagatgactgtagaactcatgaatctaaaagaattaggttctttcgatttggaaaacgtcaacgtgtatcctggagtatggaatacatacgatatcttcggtatcgaggccgctcgtgaatacttgtgcgaagccatgttaaacacctatggagaagggttcgattatctgtatcagccttgtgatcttctcgctagtttactatgtgctagttacgaaccagaatcagtgaataaattcaagttcggcgcagctagtactcttaagagagctacgttcggagacaataaagcattgttaaacgcggctcttcataaaaagtcagaacctattaacgataatagtagctgccacttttttagcaaggtccctaatataggaactggatattacaaatactttatcgacttgggtcttctcatgagaatggaaaggaaactatctgataagatatcttctcaaaagatcaaggaaatggaagaaacagaagacttttaattcttatcaataacatatttttctatgatctgtcttttaaacgatggattttccacaaatgcgcctctcaagtccctcatagaatgatacacgtataaaaaatatagcataggcaatgactccttatttttagacattagatatgccaaaatcatagccccgcttctatttactcccgcagcacaatgaaccaacacgggctcgtttcgttgatcacatttagataaaaaggcggttacgtcgtcaaaatatttactaatatcggtagttgtatcatctaccaacggtatatgaataatattaatattagagttaggtaatgtatatttatccatcgtcaaatttaaaacatatttgaacttaacttcagatgatggtgcatccatagcatttttataatttcccaaatacacattattggttacccttgtcattatagtgggagatttggctctgtgcatatctccagttgaacgtagtagtaagtatttatacaaacttttcttatccatttataacgtacaaatggataaaactactttatcggtaaacgcgtgtaatttagaatacgttagagaaaaggctatagtaggcgtacaagcagccaaaacatcaacacttatattctttgttattatattggcaattagtgcgctattactctggtttcagacgtctgataatccagtctttaatgaattaacgagatatatgcgaattaaaaatacggttaacgattggaaatcattaacggatagcaaaacaaaattagaaagtgatagaggtagacttctagccgctggtaaggatgatatattcgaattcaaatgtgtggatttcggcgcctattttatagctatgcgattggataagaaaacatatctgccgcaagctattaggcgaggtactggagacgcgtggatggttaaaaaggcggcaaaggtcgatccatctgctcaacaattttgtcagtatttgataaaacacaagtctaataatgttattacttgtggtaatgagatgttaaatgaattaggttatagcggttattttatgtcaccgcattggtgttccgattttagtaatatggaatagtgttagataaatgcggtaacgaatgttcctgtaaggaaccataacagcttagatttaacgttaaagatgagcataaacataataaacaaaattacaatcaaacctataacattaatatcaaacaatccaaaaaatgaaatcagtggagtagtaaacgcgtacataactcctggataacgtttagcagctgccgttcctattctagaccaaaaattcggtttcatgttttcgaagcggtgttctgcaacaagtcggggatcgtgttctacatatttggcggcgttatccagtatctgcctattgatcttcatttcgttttcgattctggctatttcaaaataaaatcccgatgatagacctccagactttataatttcatctacaatgttcagcgccgtagtaactctaataatataggctgataagctaacatcataccctcctgtatatgtgaatatggcatgatttttgtccattacaagctcggttttaactttattgcctgtaataatttctctcatctgtaggatatctatttttttgtcatgcattgccttcaagacgggacgaagaaacgtaatatcctcaataacgttatcgttttctacaataactacatattctacctttttattttctaactcggtaaaaaaattagaatcccatagggctaaatgtctagcgatatttcttttcgtttcctctgtacacatagtgttacaaaaccctgaaaagaagtgagtatacttgtcatcatttctaatgtttcctccagtccactgtataaacgcataatccttgtaatgatctggatcatccttgactaccacaacatctcttttttctggcataacttcgttgtcctttacatcatcgaacttctgatcattaatatgctcatgaacattaggaaatgtttctgatggaggtctatcaataactggcacaacaataacaggagttttcaccgccgccatttagttattgaaattaatcatatacaactctttaatacgagttatattttcgtctatccattgtttcacatttacatatttcgacaaaaagatataaaatgcgtattccaatgcttctctgtttaatgaattactaaaatatacaaacacgtcactgtctggcaataaatgatatcttagaatattgtaacaatttattttgtattgcacatgttcgtgatctatgagttcttcttcgaatggcataggatctccgaatctgaaaacgtataaataggagttagaataataatatttgagagtattggtaatatataaactctttagcggtataattagtttttttctctcaatttctatttttagatgtgatggaaaaatgactaattttgtagcattagtatcatgaactctaatcaaaatcttaatatcttcgtcacacgttagctctttgaagtttttaagagatgcatcagttggttctacagatggagtaggtgcaacaattttttgttctacacatgtatgtactggagccattgttttaactataatggtgcttgtatcgaaaaactttaatgcagatagcggaagctcttcgccgcgactttctacatcgtaattgggttctaacgccgatctctgaatggatactagttttctaagttctaatgtgattctctgaaaatgtaaatccaattcctccggcattatagatgtgtatacatcggtaaataaaactatagtatccaacgatcccttctcgcaaattctagtcttaaccaaaaaatcgtatataaccacggagatggcgtatttaagagtggattcttctaccgttttgttcttggatttcatataagaaactataaagtccgcactactgttaagaatgattactaacgcaactatatagtttaaattaagcatcttggaaacataaaataactctgtagacgatacttgactttcgaataagtttgcagacaaacgaagaaagaacagacctctcttaatttcagaagaaaactttttttcgtattcctgacgtctagagtttatatcaataagaaagttaagaattagtcggttaatgttgtatttcattacccaagtttgagatttcataatattatcaaaagacatgataatattaaagataaagcgctgactatgaacgaaatagctatatggttcgctcaaaaatatagtcttgttaaacgtggaaacgataactgtatttttaatcacgtcagcggcatctaaattaaatataggtatatttattccacacactctacaatatgccacaccatcttcataataaataaattcgttagcaaagttattaattttagtgaaatagttagcgtcaactttcatagcttccttcaatctaatttgatgctcacacggtgcgaattccactctaacatcccttttccatgcctcaggttcatcgatctctataatatctagttttttgcgtttcacaaacacaggctcgtctctcgcgatgagatctgtatagtaactatgtaaatgataactagatagaaagatgtagctatatagatgacgatcctttaagagaggtataataactttaccccaatcagatagactgttgttatggtcttcggaaaaagaatttttataaatttttccagtattttccaaatatacgtacttgacatctaaaaaatccttaatgataataggaatggataatccgtctattttataaagaaatacatatcgcacattatacttttttttggaaatgggaataccgatgtgtctacataaatatgcaaagtctaaatattttttagagaatcttaattggtccaaattcttttccaagtacggtaatagatttttcatattgaacggtatcttcttaatctctggttctagttccgcattaaatgatgaaactaagtcactatttttataactaacgattacatcacctctaacatcatcatttaccagaatactgatcttcttttgtcgtaaatacatgtctaatgtgttaaaaaaaagatcatacaagttatacgtcatttcatctgtggtattcttgtcattgaaggataaactcgtactaatctcttctttaacagcctgttcaaatttatatcctatatacgaaaaaatagcaaccagtgtttgatcatccgcgtcaatattctgttctatcgtagtgtataacaatcgtatatcttcttctgtgatagtcgatacgttataaaggttgataacgaaaatatttttatttcgtgaaataaagtcatcgtaggattttggacttatattcgcgtctagtagatatgcttttatttttggaatgatctcaattagaatagtctctttagagtccatttaaagttacaaacaactaggaaattggtttatgatgtataatttttttagtttttatagattctttattctatacttaaaaaatgaaaataaatacaaaggttcttgagggttgtgttaaattgaaagcgagaaataatcataaattatttcattatcgcgatatccgttaagtttgtatcgtaatggcgtggtcaattacaaataaagcggatactagtagcttcacaaagatggctgaaatcagagctcatctaaaaaatagcgctgaaaataaagataaaaacgaggatattttcccggaagatgtaataattccatctactaagcccaaaaccaaacgagccactactcctcgtaaaccagcggctactaaaagatcaaccaaaaaggaggaagtggaagaagaagtagttatagaggaatatcatcaaacaactgaaaaaaattctccatctcctggagtcagcgacattgtagaaagcgtggccgctgtagagctcgatgatagcgacggggatgatgaacctatggtacaagttgaagctggtaaagtaaatcatagtgctagaagcgatctttctgacctaaaggtggctaccgacaatatcgttaaagatcttaagaaaattattactagaatctctgcagtatcgacggttctagaggatgttcaagcagctggtatctctagacaatttacttctatgactaaagctattacaacactatctgatctagtcaccgagggaaaatctaaagttgttcgtaaaaaagttaaaacttgtaagaagtaaatgcgtgcacttttttataaagatggtaaactctttaccgataataattttttaaatcctgtatcagacgataatccagcgtatgaggttttgcaacatgttaaaattcctactcatttaacagatgtagtagtatatgaacaaacgtgggaggaggcgttaactagattaatttttgtgggaagcgattcaaaaggacgtagacaatacttttacggaaaaatgcatgtacagaatcgcaacgctaaaagagatcgtatttttgttagagtatataacgttatgaaacgaattaattgttttataaacaaaaatataaagaaatcgtccacagattccaattatcagttggcggtttttatgttaatggaaactatgttttttattagatttggtaaaatgaaatatcttaaggagaatgaaacagtagggttattaacactaaaaaataaacacatagaaataagtcccgatgaaatagttatcaagtttgtaggaaaggacaaagtttcacatgaatttgttgttcataagtctaatagactatataaaccgctattgaaactgacggatgattctagtcccgaagaatttctgttcaacaaactaagtgaacgaaaggtatacgaatgtatcaaacagtttggtattagaatcaaggatctccgaacgtatggagtcaattatacgtttttatataatttttggacaaatgtaaagtccatatctcctcttccatcaccaaaaaagttaatagcgttaactatcaaacaaactgctgaagtggtaggtcatactccatcaatttcaaaaagagcttacatggcaacgactattttagaaatggtaaaggataaaaattttttagatgtagtatctaaaactacgttcgatgaattcctatctatagtcgtagatcacgttaaatcatctacggatggatgatatagatctttacacaaataattacaagaccgataaatggaaatggataagcgtatgaaatctctcgcaatgaccgctttctttggggagctaagcacattagatattatggcattgataatgtctatatttaaacgccatccaaacaataccattttttcagtggataaggatggtcagtttatgattgatttcgaatacgataattataaggcttctcaatatttggatctgaccctcactccgatatttggagatgaatgcaagactcacgcatcgagtatagccgaacaattggcgtgtgcggatattattaaagaggatattagcgaatacatcaaaactactccccgtcttaaacgatttataaaaaaataccgcaatagatcagatactcgcatcagtcgagatacagaaaagcttaaaatagctctagctaaaggcatagattacgaatatataaaagacgcttgttaataagtaaatgaaaaaaaactagtcgtttataataaaacacaatatggatgccaacatagtatcatcttctactattgcaacgtatatagacgctttagcgaagaatgcttcagaattagaacagaggtctaccgcatacgaaataaataatgaattggaactagtatttattaagccgccattaattactttgacaaatgtagtgaatatctctacgattcaggaatcgtttattcgatttaccgttactaataaggaaggtgttaaaattagaactaagattccattatctaaggtacatggtctagatgtaaaaaatgtacagttagtagatgctatagataacatagtttgggaaaagaaatcattagtgacggaaaatcgtcttcacaaagaatgcttgttgagactatcgacagaggaacgtcatatatttttggattacaagaaatatggatcctctatccgactagaattagtcaatcttattcaagcaaaaacaaaaaactttacgatagactttaagctaaaatattttctaggatccggtgcccaatctaaaagttctttgttgcacgctattaatcatccaaagtcaaggcctaatacatctctggaaatagaattcacacctagagacaatgaaaaagttccatatgatgaactaataaaggaattgacgactctatcacgtcatatatttatggcttctccagagaatgtaattctttctccgcctattaacgcacctataaagacttttatgttgcctaaacaagatatagtaggtctggatctggaaaatctatatgccgtaactaagactgacggcattcctataactatcagagttacatcaaacgggttgtattgttattttacacatcttggttatattattagatatcctgttaagagaataatagattccgaagtagtagtctttggtgaggcagttaaggataagaactggaccgtatatctcattaagctaatagagcctgtgaatgcaatcaatgatagactagaagaaagtaagtatgttgaatctaaactagtggatatttgtgatcggatagtattcaagtcaaagaaatatgaaggtccgtttactacaactagtgaagtcgtcgatatgttatctacatatttaccaaagcaaccagaaggtgttattctgttctattcaaagggacctaaatctaacattgattttaaaattaaaaaggaaaatactatagaccaaactgcaaatgtagtatttaggtacatgtccagtgaaccaattatctttggagaatcgtctatctttgtagagtataagaaatttagcaacgataaaggctttcctaaagaatatggttctggtaagattgtgttatataacggcgttaattatctaaataatatctattgtttggaatatattaatacacataatgaagtgggtattaagtccgtggttgtacctattaagtttatagcagaattcttagttaatggagaaatacttaaacctagaattgataaaaccatgaaatatattaactcagaagattattatggaaatcaacataatatcatagttgaacatttaagagatcaaagcatcaaaataggagatatctttaacgaggataaactatcggatgtgggacatcaatacgccaataatgataaatttagattaaatccagaagttagttattttacgaataaacgaactagaggaccgttgggaattttatcaaactacgtcaagactcttcttatttctatgtattgttccaaaacatttttagacgattccaacaaacgaaaggtattggcgattgattttggaaacggtgcggacctggaaaaatacttttatggagagattgcgttattggtagcgacggatccggatgctgatgctatagctagaggaaatgaaagatacaacaaattaaactctggaattaaaaccaagtactacaaatttgactacattcaggaaactattcgatccgatacatttgtctctagtgtcagagaagtattctattttggaaagtttaatatcatcgactggcagtttgctatccattattcttttcatccgagacattatgctaccgtcatgaataacttatccgaactaactgcttctggaggcaaggtattaatcactaccatggacggagacaaattatcaaaattaacagataaaaagacttttataattcataagaatttacctagtagcgaaaactatatgtctgtagaaaaaatagctgatgatagaatagtggtatataatccatcaacaatgtctactccaatgactgaatacattatcaaaaagaacgatatagtcagagtgtttaacgaatacggatttgttcttgtagataacgttgatttcgctacaattatagaacgaagtaaaaagtttattaatggcgcatctacaatggaagatagaccgtctacaaaaaactttttcgaactaaatagaggagccattaaatgtgaaggtttagatgtcgaagacttacttagttactatgttgtttatgtcttttctaagcggtaaataataatatggtatgggttctgatatccccgttctaaatgcattaaataattccaatagagcgatttttgttcctataggaccttccaactgtggatactctgtattgttaatagatatattaatacttttgtcgggtaacagaggttctacgtcttctaaaaataaaagtttgataacatctggcctgttcataaataaaaacttggcgattctatatatactcttattatcaaatctagccattgtcttatagatgtgagctactgtaggtgtaccatttgattttctttctaatactatatatttctctcgaagaagttcttgcacatcatctgggaataaaatactactgttgagtaaatcagttattttttttatatcgatattgatggacatttttatagttaaggataataagtatcccaaagtcgataacgacgataacgaagtatttatacttttaggaaatcacaatgactttatcagatcaaaattaacaaaattaaaggagcatgtatttttttctgaatatattgtgactccagatacatatggatctttatgcgtcgaattaaatgggtctagttttcagcacggtggtagatatatagaggtggaggaatttatagatgctggaagacaagttagatggtgttctacatccaatcatatatctgaagatatgcacactgataaatttgtcatttatgatatttatacgtttgattcgttcaagaataaacgattggtatttgtacaggtgcctccatcattaggagatgatagctatttgactaatccgttattgtctccgtattatcgtaattcagtagccagacaaatggtcaatgatatgatttttaatcaagattcatttttaaaatatttattagaacatctgattagaagccactatagagtttctaaacatataacaatagttagatacaaggataccgaagaattaaatctaacgagaatatgttataatagagataagtttaaggcgtttgtattcgcttggtttaacggcgttttggaaaatgaaaaggtactagatacgtataaaaaggtatctaatttgatataatgaattcagtgactgtatcacacgcgccatatactattacttatcacgatgattggaaaccagtaatgagtcaattggtagagttttataacgaagtagccagttggctgctacgagacgagacgtcgcctattcctgataagttctttatacagttgaaacaaccgcttagaaataaacgagtatgtgtgtgcggtatagatccgtatccgaaagatggaactggtgtaccgttcgaatcaccaaattttacaaaaaaatcaattaaggagatagcttcatctatatctagattaaccggagtaattgattataaaggttataaccttaatataatagacggggttataccctggaattattacttaagttgtaaattaggagaaacaaaaagtcacgcgatctactgggataagatttccaagttactgctgcagcatataactaaacacgttagtgttctttattgtttgggtaaaacagatttctcgaatatacgggccaagttagaatccccggtaactaccatagtcggatatcatccagcggctagagaccgccaattcgagaaagatagatcatttgaaattatcaacgttttactggaattagacaacaaggcacctataaattgggctcaagggtttatttattaatgctttagtgaaattttaacttgtgttctaaatggatgcaactattagaggtaatgatgttatctttgttcttaagactataggtgtcccgtcagcgtgcagacaaaatgaagatccaagatttgtagaagcatttaaatgcgacgagttagaaagatatattgagaataatccagaatgtacactattcgaaagtcttagggatgaggaagcatactctatagtcagaattttcatggatgtagatttagacgcgtgtctagacgaaatagattatttaacggctattcaagattttattatcgaggtgtcaaactgtgtagctagattcgcgtttacagaatgcggtgccattcatgaaaatgtaataaaatccatgagatctaatttttcattgactaagtctacaaatagagataaaacaagttttcatattatctttttagacacgtataccactatggatacattgatagctatgaaacgaacactattagaattaagtagatcatctgaaaatccactaaccagatcgatagacactgccgtatataggagaaaaacaactcttcgggttgtaggtactaggaaaaatccaaattgcgacactattcatgtaatgcaaccaccgcatgataatatagaagattacctattcacttacgtggatatgaacaacaatagttattacttttctctacaacgacgattggaggatttagttcctgataagttatgggaaccagggtttatttcattcgaagacgctataaaaagagtttcaaaaatattcattaattctataataaactttaatgatctcgatgaaaataattttacaacggtaccactggtcatagattacgtaacaccttgtgcattatgtaaaaaacgatcgcataaacatccgcatcaactatcgttggaaaatggtgctattagaatttacaaaactggtaatccacatagttgtaaagttaaaattgttccgttggatggtaataaactgtttaatattgcacaaagaattttagacactaactctgttttattaaccgaacgaggagaccatatagtttggattaataattcatggaaatttaacagcgaagaacccttgataacaaaactaattctgtcaataagacatcaactacctaaggaatattcaagcgaattactctgtccgaggaaacgaaagactgtagaagctaacatacgagacatgttaatagattcagtggagaccgatacctatccggataaacttccgtttaaaaatggtgtattggacctggtagacggaatgttttactctggagatgatgctaaaaaatatacgtgtactgtatcaaccggatttaaatttgacgatacaaagttcgtcgaagacagtccagaaatggaagagttaatgaatatcattaacgatatccaaccattaacggatgaaaataagaaaaatagagagttgtacgaaaaaactttatctagttgtttatgcggtgctaccaaaggatgtttaacattcttttttggagaaactgcaactggaaagtcgacaaccaaacgtttgttaaagtctgctatcggtgacctgtttgttgagacgggtcaaacaattttaacagatgtattggataaaggacctaatccatttatcgctaacatgcatttgaaaagatctgtattctgtagcgaactacctgattttgcctgtagtggatcaaagaaaattagatctgacaatattaaaaagttgacagaaccttgtgtcattggaagaccgtgtttctccaataaaattaataatagaaaccatgcgacaatcattatcgatactaattacaaacctgtctttgataggatagataacgcattaatgagaagaattgccgtcgtgcgattcagaacacacttttctcaaccttctggtagagaggctgctgaaaataatgacgcgtacgataaagtcaaactattagacgaggggttagatggtaaaatacaaaataatagatatagattcgcatttctatacttgttggtgaaatggtacaaaaaatatcatgttcctattatgaaactatatcctacaccggaagagattccggactttgcattctatctcaaaataggtactctgttagtatctagctctgtaaagcatattccattaatgacggacctctccaaaaagggatatatattgtacgataatgtggttactcttccgttgactactttccaacagaaaatatccaagtattttaattctagactatttggacacgatatagagagcttcatcaatagacataagaaatttgccaatgttagtgatgaatatctgcaatatatattcatagaggatatttcatctccgtaaatatatgctcatatatttatagaagatatcacatatctaaatgaataccggaatcatagatttatttgataatcatgttgatagtataccaactatattacctcatcagttagctactctagattatctagttagaactatcatagatgagaacagaagcgtgttattgttccatattatgggatcaggtaaaacaataatcgctttgttgttcgccttggtagcttccagatttaaaaaggtttacattctagtgcctaatattaacattttgaaaattttcaattataatatgggtgtagctatgaacttgtttaatgacaaattcatagctgagaatatctttattcattccacaacaagtttttattctcttaattataacgataacgtcattaattataacggattatctcgctacaataactctatttttatcgttgatgaggcacataatatctttgggaataatactggagaacttatgaccgtgataaaaaataaaaacaagattccttttttactattgtctggatctcccattactaacacacctaatactctgggtcatattatagatttaatgtccgaagagacgatagattttggtgaaattattagtcgtggtaagaaagtaattcagacacttcttaacgaacgcggtgtgaatgtacttaaggatttgcttaaaggaagaatatcatattacgaaatgcctgataaagatctaccaacgataagatatcacggacgtaagtttctagatactagagtagtatattgtcacatgtctaaacttcaagagagagattatatgattactagacgacagctatgttatcatgaaatgtttgataaaaatatgtataacgtgtcaatggcagtattgggacaacttaatctgatgaataatttagatactttatttcaggaacaggataaggaattgtacccaaatctgaaaataaataatggcgtgttatacggagaagaattggtaacgttaaacattagttccaaatttaaatactttattaatcggatacagacactcaacggaaaacattttatatacttttctaattctacatatggcggattggtaattaaatatatcatgctcagtaatggatattctgaatataatggttctcagggaactaatccacatatgataaacggcaaaccaaaaacatttgctatcgttactagtaaaatgaaatcgtctttagaggatctattagatgtgtataattctcctgaaaacgatgatggcagtcaattgatgtttttgttttcgtcaaacattatgtccgaatcctatactctgaaagaggtaaggcatatttggtttatgactatcccagatactttttctcaatacaaccaaattcttggacgatctattagaaaattctcttacgccgatatttctgaaccagttaatgtatatcttttagccgccgtatattccgatttcaatgacgaagtgacgtcattaaacgattacacacaggatgaattgattaatgttttaccatttgacatcaaaaagctgttgtatctaaaatttaagactaaagaaacgaatagaatatactctattcttcaagagatgtctgaaacgtattctcttccaccacatccatcaattgtaaaagttttattgggagaattggtcagacaatttttttataataattctcgtattaagtataacgataccaagttacttaaaatggttacatcagttataaaaaataaagaagacgctaggaattacatagatgatattgtaaacggtcacttctttgtatcgaataaagtatttgataaatctcttttatacaaatacgaaaacgatattattacagtaccgtttagactttcctacgaaccatttgtttggggagttaactttcgtaaagaatataacgtggtatcttctccataaaactgatgagatatataaagaaataaatgtcgagctttgttaccaatggataccttccagttacattggagccacacgagctgacgttagacataaaaactaatattaggaatgccgtatataagacgtatctccatagagaaattagtggtaaaatggccaagaaaatagaaattcgtgaagacgtggaattacctctcggcgaaatagttaataattctgtagttataaacgttccgtgtgtaataacctacgcgtattatcacgttggggatatagtcagaggaacattaaacatcgaagatgaatcaaatgtaactattcaatgtggagatttaatctgtaaactaagtagagattcgggtactgtatcatttagcgattcaaagtactgcttttttcgaaatggtaatgcgtatgacaatggcagcgaagtcactgccgttctaatggaggctcaacaaggtatcgaatctagttttgtttttctcgcgaatatcgttgactcataaaaaagagaatagcggtaagtataaacacgaatactatggcaataattgcgaatgttttattcccttcgatatatttttgataatatgaaaaacatgtctctctcaaatcggacaaccatctcataaaatagttctcgcgcgctggagaggtagttgctgctcgtataatctccccagaataatatacttgcgtgtcgtcgttcaatttatacggatttctatagttctctgttatataatgcggttttccatcatgattagacgacgacaatagtgttctaaatttagatagttgatcagaatgaatgtttattggcgttggaaaaattatccatacagcgtctgcagagtggttgatagttgttcctagatatgtaaaataatccaacttactaggcagcaaattgtctagataaaatactgaatcaaacggtgcagacgtattggtggatctaatggaatccaattgattaactatcttttgaaaatatacatttttatgatccgatacttgtaagaatatagaaataatgataagtccatcatcgtgtttttttgcctcttcataagaactatattttttcttattccaatgaacaagattaatctctccagagtatttgtacacatctatcaagtgattggatccataatcgtcttcctttccccaatatatacgtagtgatgataacacatattcattggggagaaaccctccacttatatatcctcctttaaaattaatccttactagttttccagtgttctggatagtggttggtttcgactcattataatgtatgtctaacggcttcaatcgcgcgttagaaattgcttttttagtttctatattaataggagatagttgttgcggcatagtaaaaatgaaatgataactgtttaaaaatagctcttagtatgggaattacaatggatgaggaagtgatatttgaaactcctagagaattaatatctattaaacgaataaaagatattccaagatcaaaagacacgcatgtgtttgctgcgtgtataacaagtgacggatatccgttaataggagctagaagaacttcattcgcattccaagcgatattatctcaacaaaattcagattctatctttagagtatccactaaactattacggtttatgtactacaatgaactaagagaaatctttagacggttgagaaaaggttctatcaacgatatcgatcctcactttgaagagttaatattattgggtggtaaactagataaaaaggaatctattaaagattgtttaagaagagaattaaaagaggaaagtgatgaacgtataacagtaaaagaatttggaaatgtaattctaaaacttacaacacgggataaattatttaataaagtatatataagttattgcatggcgtgttttattaatcaatcgttggaggatttatcgcatactagtatttacaatgtagaaattagaaagattaaatcattaaatgattgtattaacgacgataaatacgaatatctgtcttatatttataatatgctagttaatagtaaatgaacttttacagatctagtataattagtcagattattaagtataatagacgactagctaagtctattatttgcgaggatgactctcaaattattacactcacggcattcgttaaccaatgcctatggtgtcataaacgagtatccgtgtccgctattttattaactactgataacaaaatattagtatgtaacagacgagatagttttctctattctgaaataattagaactagaaacatgtctagaaagaaacgattatttctgaattattccaattatttgtccaaacaggaaagaagtatactatcgtcatttttttctctagatccagctactactgataatgatagaatagatgctatttatccgggtggcatacccaaaaggggtgagaatgttccagagtgtttatccagggaaattaaagaagaagttaatatagacaattcttttgtattcatagacactcggttttttattcatggcatcatagaagataccattattaataaattttttgaggtaatcttctttgtcggaagaatatctttaacgagtgatcaaatcattgatacatttaaaagtaatcatgaaatcaaggatctaatatttttagatccgaattcaggtaatggactccaatacgaaattgcaaaatatgctctagatactgcaaaactcaaatgttatggccatagaggatgttattacgaatcattaaaaaaattaactgaggatgattgattagaaaatataaattaatttaccatcgtgtatttttataacgggattgtccggcatatcatgtagatagttaccgtctacatcgtatactcgaccatctacgcctttaaatcctctatttattgacattaatctattagaattggaataccaaatattagtaccctcaattagtttattggtaatattttttttagacgatagatcgatggctcttgaaaccaaggttttccaaccggactcattgtcgatcggtgagaagtctttttcattagcatgaatccattctaatgatgtatgtttaaacactctaaacaattggacaaattcttttgatttgctttgaatgatttcaaataggtcttcgtctacagtaggcataccattagataatctagccattataaagtgcacgtttacatatctacgttctggaggagtaagaacgtgactattgagacgaatggctcttcctactatctgacgaagagacgcctcgttccatgtcatatctaaaatgaagatatcattaattgagaaaaaactaataccctcgcctccactagaagagaatacgcatgttttaatgcattctccgttagtgtttgattcttggttaaactcagccaccgccttgattctagtatcttttgttctagatgagaactctatattagagataccaaagactttgaaatatagtaataagatttctattcctgactgattaacaaatggttcaaagactagacatttaccatgggatgctaatattcccaaacatacatctataaatttgacgcttttctcttttaattcagtaaatagagagatatcagccgcactagcatcccctttcaatagttctccctttttaaaggtatctaatgcggatttagaaaactctctatctcttaatgaatttttaaaatcattatatagtgttgctatctcttgcgcgtattcgcccggatcacgattttgtctttcaggaaagctatcgaacgtaaacgtagtagccatacgtctcagaattctaaatgatgatatacctgtttttatttcagcgagtttagccttttgataaatttcttcttgctttttcgacatattaacgtatcgcattaatactgttttcttagcgaatgatgcagacccttctacgtcatcaaaaatagaaaactcgttattaactatgtacgaacataggcctcctagtttggagactaattctttctcatcaactagacgtttattctcaaatagcgattggtgttgtaaggatcctggtcgtagtaagttaaccaacatggtgaattcttgcacactattaacgataggtgtagccgataaacaaatcatcttatggttttttaatgcgatggtcttagataaaaaattatatactgaacgagtaggacggatcttaccatcttctttgattaatgatttagaaatgaagttatgacattcatcaataatgacgcatattctactcttggaattaatagttttgatattagtaaaaaatttatttctaaaattttgatcatcgtaattaataaaaatacaatccttcgttatctctggagcgtatctgagtatagtgttcatccaaggatcttctatcaaagcctttttcaccaataagataatagcccaattcgtataaatatccttaagatgtttgagaatatatacagtagtcattgttttaccaacacccgtttcatggaacaataaaagagaatgcatactgtctaatcctaagaaaactcttgctacaaaatgttgataatccttgaggcgtactacgtctgttcccatcatttcaacaggcatattagtagttctgcgcaatgcataatcgatataggccgcgtgtgatttactcatttatgagtgataagtaataactatgttttaaaaatcacagcagtagtttaactagtcttctctgatgtttgttttcgatactttttgaatcagaagtcatactagaataaagcaacgagtgaacgtaatagagagcttcgtatactctattcgaaaactctaagaacttattaatgaattccgtatccactggattgtttaaaatactaaattgaacactgttcacatccttccaagaagaagacttagtgacggacttaacatgagacataaataaatccaaattttttttacaaacatcactagccaccataatggcgctatctttcaaccagctatcgcttacgcattttagcagtctaacatttttaaagagactacaatatattctcatagtatcgattacacctctaccgaataaagttggaagtttaataatacaatatttttcgtttacaaaatcaaataatggtcgaaacacgtcgaaggttaacatcttataatcgctaatgtatagattgttttcagtgagatgattattagatttaatagcatctcgttcacgtttgaacagtttattgtgtgcgctgaggtcggcaactacggcgtccgctttagtactcctcccataatactttacgctattaatctttaaaatttcatagactttatctagatcgctttctggtaacatgatatcatgtgtaaaaagttttaacatgtcggtcggcattctatttagatcattaactctagaaatctgaagaaagtaattagctccgtattccagactaggtaatgggcttttacctaaagacaagttaagttctggcaatgtttcataaaatggaagaaggacatgcgttccctcccggatattttttacaatttcatccatttacaactctatagtttgttttcattattattagttattatctcccataatcttggtaatacttaccccttgatcgtaagataccttatacaggtcattacatacaactaccaattgtttttgtacataatagattggatggttgacatccatggtggaataaactactcgaacagatagtttatctttccccctagatacattggccgtaatagttgtcggcctaaagaatatctttggtgtaaagttaaaagttagggttcttgttccattattgctttttgtcagtagttcattataaattctcgagatgggtccgttctctgaatatagaacatcatttccaaatctaacttctagtctagaaataatatcggtcttattcttaaaatctattcccttgatgaagggatcgttaatgaacaaatccttggcctttgattcggctgatctattatctccgttatagacgttacgttgactagtccaaagacttacaggaatagatgtatcgatgatgttgatactatgtgatatgtgagcaaagattgttctcttagtggcatcactatatgttccagtaatggcggaaaactttttagaaatgttatatataaaagaattttttcgtgttccaaacattagcagattagtatgaagataaacactcatattatcaggaacattatcaatttttacatacacatcagcatcttgaatagaaacgataccatcttctggaacctcaacaatctcggcagactccggataaccagtcggtgggccatcactaacaataactagatcatccaacaatctactcacatatgcatctatataatctttttcatcttgtgagtaccctggatacgaaataaatttattatccgtatttccataataaggtttagtataaacagagagcgatgttgccgcatgaacttcagttacagtcgccgttggttggtttatttgacctattactctcctaggtttctctataaacgatggtttaatttgtacattcttaaccatatatccaataaagctcaattcaggaacataaacaaattctttgttgaacgtttcaaagtcgaacgaagagtcacgaataacgatatcggatactggattgaaggttaccgttacggtaatttttgaatcggatagtttaagactgctgaatgtatcttccacatcaaacggagttttaatataaacgtatactgtagatggttctttaatagtgtcattaggagttaggccaatagaaatatcattaagttcactagaatatccagagtgtttcaaagcaattgtattattgatacaattattatataattcttcgccctcaatttcccaaataacaccgttacacgaagagatagatacgtgattaatacatttatatccaacatatggtacgtaaccgaatcttcccatacctttaacttctggaagttccaaactcagaaccaaatgattaagcgcagtaatatactgatccctaatttcgaagctagcgatagcctgattgtctggaccatcgtttgtcataactccggatagagaaatatattgcggcatatacaaagttggaatttgactatcgactgcgaagacattagaccgtttaatagagtcatccccaccgatcaaagaattaatgatagtattattcattttctatttaaaatggaaaaagcttacaataaactccgtagagaaatatctataatttgtgagttttccttaaagtaacagcttccgtaaacgccgtctttatctcttagtaggtttattgtatttatgaccttttccttatcttcatagaatactaaaggcaacaaagaaatttttggttcttctctaagagctacgtgagacttaaccatagaagccaacgaatccctacatattttagaacagaaatacccaacttcaccacccttgaatgtctcaatactaataggtctaaaaaccaaatcttgattacaaaaccaacacttatcaattacactatttgtcttaatagacacatctgccatagatttataatactttggtagtatacaagcgagtgcttcttctttagcgggcttaaagactgctttaggtgctgaaataaccacatctggaaggcttactcgcttagccatttaattacggaactatttttttatacttctaatgagcaagtagaaaacctctcatctacaaaaacatactcgtgtccataatcctctaccatagttacacgttttttagatctcatatgtgctaaaaagttttcccatactaattggttactattatttttcgtataatttttaacagtttgaggttttagatttttagttacagaagtgatatcgaatattttatccaaaaagaatgaataattaattgtcttagaaggagtgttttcttggcaaaagaataccaagtgcttaaatatttctactacttcattaatcttttctgtactcagattcagtttctcatcttttacttgattgattatttcaaagactaacttataatcctttttatttattctctcgttagccttaagaaaactagatacaaaatttgcatctacatcatccgtggatatttgatttttttccatgatatccaagagttccgagataatttctccagaacattgatgagacaataatctccgcaatacatttctcaaatgaataagtttattagacacatggaagtttgactttttttgtacctttgtacatttttgaaatacagactcgcaaaaaatacaatattcatatccttgttcagatactataccgttgtgtctacaaccgctacataatcgtagattcatgttaacactctacgtatctcgtcgtccaatattttatataaaaacattttatttctagacgttgccagaaaatcctgtaatatttttagttttttgggctgtgaataaagtatcgccctaatatggttaccgtcctccgccaatatagtagttaaattatccgcacatgcagaagaacaccgcttaggcggattcagtacaatgttatatttttcgtaccaactcatttaaatatcataatctaaaatagttctgtaatatgtctagcgctaatatattgatcataatcctgtgcataaattaagatacaacaatgtctcgaaatcatcgacatggcttcttccatagttagaagatcgtcgtcaaagttagcaacgtgattcatcaacatttgctgttttgaggcagcaaatactgaaccgtcgccattcaaccattcataaaaaccatcgtctgaatccattgataatttcttgtactggtttttgagagctcgcatcaatctagcatttctagctcccggattgaaaacagaaagaggatcgtacatccagggtccattttctgtaaatagaatcgtataatgtcccttcaagaagatatcagacgatccacaatcaaagaattggtctccgagtttgtaacaaactgcggactttaacctatacatgataccgtttagcatgatttctggtgatacgtcaatcggagtatcatctattagagatctaaagccggtgtaacattctccaccaaacatattcttattctgacgtcgttctacataaaacatcattgctccattaacgataacaggggaatgaacagcactacccatcacattagttcccaatggatcaatgtgtgtaactccagaacatcttccatatcctatgttaggaggagcgaacaccactcttccactattgccatcgaatgccatagaataaatatccttggaattgatagaaatcggactgtcggatgttgtgatcatcttcataggattaacaactatgtatggtgccgcctgaagtttcatatcgtaactgatgccgtttataggtctagccacagaaaccaacgtaggtctaaatccaactatagacaaaatagaagccaatatctgttcttcatctgtcataacttgagagcatccagtatgaataatcttcattagatggggatctaccgcatcatcatcgttacaataaaaaattcccattctaatgttcataattgcttttctaatcatggtatgcatgtttgctctctgaatctctgtggaaattagatctgatacacctgtaatcactatcggattatcctccgtaagacgattaaccaacaacatataattataagactttacttttctaaattcataaagttgctggattaggctataggtgtctccatgtacatacgcgttctcgagcgcaggaagtttaataccgaatagtgccatcagaataggatgaatatagtaattagtttctggttttctataaataaaagacaaatcttgtgaactagacatatcggtaaaatgcatggattggaatcgtgtagtcgacagaagaatatgatgattagatggagagtatattttatctaactctttgagttggtcaccgattctaggactagctcgagaatgaataagtactaaaggatgagtacatttcacagaaacactagcattgttcaatgtgctctttacatgggtaaggagttgaaatagctcgtttctatttgttctgacaatatttagtttattcataatgttaagcatatcctgaatagtaaagttagatgtgtcatacttgttagtagttagatatttagcaattgcattcccatcatttctcaatctcgtactccaatcatgcgtggatgctacttcgtcgatggaaaccatacaatcctttttgataggctgttgagattgattatttcctgcacgtttaggtttggtacgttgatttctagcccctgcggatataaagtcatcgtctacaattttggataatgaattgcatacactacaagacaaagatttatcagaagtgtgaatatgatcttcatctaccaaagaaagagtttgattagtataactagattttagtcctgcgttagatgttaaaaaaacatcgctattgaccacggcttccattatttatattcgtagtttttactcgaaagcgtgattttaatattcaatcttattacttttggaatcgttcaaaacctttgactaattgtagaatttgatctattgccctacgcgtatactcccttgcatcatatacgttcgtcaccagatcgtttgtttcggcctgaagttggtgcatatctctttcaacattcgacatgagatccttaagggccatatcgtctagattttgttgagatgctgctcctggatttggattttgttgtgctgttgtacatactgtaccaccagtaggtgtaggagtacatacagtggccacaataggaggttgaggaggtgtaaccgttggagtagtacaagaaatacttccatccgattgttgtgtacatgtagttgttggtaacgtctgagaaggttgggtagatggcggtgtcgtcgtcttttgatctttattaaatttagagataatatcctgaacagcattgctcggcgtcaacgctggaaggagtgaactcgccggcgcatcagtatctgcagacagccaatcaaaaagattagacatatcagatgatgtattagtttgttgtcgtggttttggtgtaggagccggtgtagctgttggaaccggctgtggagttatatgaatagttggttgtagcggttggataggctgtctgctggcggccatcatattatctctagctagttgttctcgcaactgtctttgataatacgactcttgagactttagtcctatttcaatcgcttcatcctttttcgtatccggatccttttcttcagaataatagattgacgactttggtgtagaggattctgccagcccctgtgagaacttgttaaagaagtccatttaaggctttaaaattgaattgcgattataagattaaatggcagacacagacgatattatcgactatgaatccgatgatctcaccgaatacgaggatgatgaagaagaggaagaagatggagagtcactagaaactagtgatatagatcccaaatcttcttataagattgtagaatcagcatccactcatatagaagatgcgcattccaatcttaaacatatagggaatcatatatctgctcttaaacgacgctatactagacgtataagtctatttgaaatagcgggtataatagcagaaagctataacttgcttcaacgaggaagattacctctagtttcagaattttctgacgaaacgatgaagcaaaatatgctacatgtaattatacaagagatagaggagggttcttgtcctatagtcatcgaaaagaacggagaattgttgtcggtaaacgattttgacaaagatggtctaaaattccatctagactatattatcaaaatttggaaacttcaaaaacgatattagaatttatacgaatatcgttctctaaatgtcacaatcaagtctcgcatgttcagcaatttattgtcgtactttatatcgtgttcattaacgatatcttgcaaaatagtaatgattctatcttccttcgatagatattcttcagagattattgtcttatattctttcttgttatcagatatgaatttgataagactttgaacattattgatacccgtctgtttaattttttctacagatattttagttttggcagattctatcgtatctgtcaatagacatccaacatcgacattcgacgtcaattgtctataaatcaacgtataaattttagaaataacattagcgaattgttgtgcattgatgtcgttattctgaaacagtatgattttaggtagcattttcttaacaaagagaacgtatttattgttactcagttgaacagatgatatatccagattactaacgcatctgattccatataccaaactttcagaagaaatggtgtacaattgtttgtattcattcaatgtctctttttcagaaattagtttagagtcgaatactgcaataattttcaagagatagttttcatcagataagattttatttagtgtagatatgataaaactattgttttgttggagaacttgatacgccgcgttctctgtagtcgacgctctcaaatgggaaacaatctccattatttttttggaatcggatacaatatcttcggtatcttgacgcaatctagtatacatagagttaagagaaattagagtttgtacattaagcaacatgtctctaaatgtggctgcaaacttttccttttccacatcatctagtttattatataccgatttcacaacggcaccagatttaaggaaccagaatgaaaaactctgataactacaatatttcatcatagttacgattttatcatcttctatagttggtgtaatagcgcatacctttttctccaagactggaaccaacgtcataaaaatgtttaaatcaaaatccatatcaacatctgatgcgctaagaccagtctcgcgttcaagattatctttactaatggtgacgaactcatcgtatagaactctaagtttgtccattatttatttacagatttagttgtttaatttatttgtgctcttccagagttgggatagtatttttctaacgtcggtattatattattaggatctacgttcatatgtatcataatattaatcatccacgttttgataaatctatctttagcttctgaaataacgtatttaaacaaaggagaaaaatatttagctacggcatcagacgcaataacattttttgtaaatgtaacgtatttagacgacagatcttcgttaaaaagttttccatctatgtagaatccatcggttgttaacaccattcccgcgtcagattgaataggagtttgaatagtttgttttggaaatagatccttcaataacttatagttgggtgggaaaaaatcgattttatcactagactctttcttttttactatcattacctcatgaactatttcttgaatgagtatatgtattttctttcctatatcggacgcgttcattggaaaatataccatgtcgttaactataagaatatttttatcctcgtttacaaactgaataatatcagatgtagttcgtaaacgaactatatcatcaccagcacaacatctaactatatgatatccactagtttcctttagtcgtttattatcttgttccatattagcagtcattccatcatttaagaaggcgtcaaagataatagggagaaatgacattttggattctgttacaactttaccaaaattaaggatatacggacttactatctttttctcaacgtcgatttgatgaacacacgatgaaaatgtacttcgatgagattgatcatgtagaaaacaacaagggatacaatatttccacatatcatgaaatatattaagaaatcccaccttattatatttccccaaaggatccatgcatgtaaacattatgccgttatcattaataaagacttctttctcatcggatctgtaaaagttgttactgatttttttcattccaggatctagataattaataatgatgggttttctattcttattctttgtattttggcatatcctagaccagtaaacagtttccactttggtaaaatcagcagacttttgaacgctattaaacatggcattaatggcaataactaaaaatgtaaaatatttttctatgttaggaatatggtttttcactttaatagatatatggtttttggccaaaatgatagatatttttttatccgaggatagtaaaatattattagtcgccgtctctataaaaatgaagctagtctcgatatccaattttattctagaattgataggagtcgccaaatgtaccttatacgttatatctcccttgatgcgttccatttgtgtatctatatcggacacaagatctgtaaatagttttacgttattaatcatcacggtatcgccgtcgctagataacgctaatgtaccatccaagtcccaaatggagagatttaactgttcatcgtttagaataaaatgattaccggtcatattaataaagtgttcatcgtatctagataacaacgacttataattaatgtccaagtcttgaactcgctgaatgatcttttttaacccagttagttttagattggtacgaaatatattgttaaactttgattctacagtaatgtccaaatctagttgtggaaatacttccatcaacattgtttcaaacttgataatattattatctacatcttcatacgatccaaattccggaatagatgtatcgcacgctctggccacccagataaccaaaaagtcacacgctccaggatatacattgtataaaaagctatcgttttttagtagtgtttttttctgagtatatacgaagggattaaaaatagtattatcaacgtaactatattccaaattattcttatgagaatagataataatatcgtccttaatatctaacaaatttcctaaatatccctttaattgagtcattcgaagcgtcaatagaatatgtctcttaactatttccggctgttgtatatttaaatgacttcgtaaaaaataatatatgggcgacttctcatctatgtaatcatatggagtgagatatagggctcgttctacctcctgccccttacccacctgtaataccaattgcggacttactatatatcgcatatttatatcgtggggtaaagtgaaaatctactaccgatgatgtaagtcttacaatgttcgaaccagtaccagatcttaatttggaggcctccgtagaactaggggaggtaaatatagatcaaacaacacctatgataaaggaaaatagcggttttatatcccgtagtagacgtctattcgcccatagatctaaggatgatgagagaaaactagcactacgattctttttacaaagactttattttttagatcatagagagattcattatttgttcagatgcgttgacgctgtaaaagacgtcactattaccaaaaaaaataacattatcgtggcgccttatatagcacttttaactatcgcatcaaaaggatgcaaacttacagaaacaatgattgaagcattctttccagaactatataatgaacatagtaagaaatttaaattcaactctcaagtatccatcatccaagaaaaactcggataccagtttggaaactatcacgtttatgattttgaaccgtattactctacagtagctctggctattcgagatgaacattcatctggcatttttaatatccgtcaagagagttatctggtaagttcattatctgaaataacatatagattttatctaattaatctaaaatctgatcttgttcaatggagtgctagtacgggcgctgtaattaatcaaatggtaaatactgtattgattacagtgtatgaaaagttacaactggtcatagaaaatgattcacaatttacatgttcattggctgtggaatcaaaacttccaataaaattacttaaagatagaaatgaattatttacaaaattcatcaacgagttaaaaaagaccagttcattcaagataagcaaacgcgataaggatacgctactaaaatattttacttaggactggagttagaatttatagacgactcatttcgtttatcattattagtattcttcttgttatcttgttcagaaatatacagcaatgctatgcctaatactaaatacattatcatgcttgcaatggctctaacaacgacgaaccaaaatgaatttggtcgtagcttttgttcacaaaaatacataaagaaatgtctacataaatctatggcgccattggctacttgaaatagcgccagtcctcctacagattttaatatagctgtataacatgacatttattcatcatcaaaagagacagagtcaccatctgtcatatttagattttttttcatgtgttcaaagtatcctctactcatttcattataatagtttatcatacttagaattttaggacggatcaatgagtaagacttgactagatcgtcagtagtaatttgtgcatcgtctattctgcatccgcttcgtcgaataatgtatagcatcgctttgagattctccatagctatcaagtctttatacaatgacatggaaatatctgtgaatactttatacttctccaacatcgatgccttaacatcatcgcctactttagcattgaaaatacgttctattgtgtagatggatgtagcaagatttttaaacaacaatgccatcttacacgatgattgcctcaagtctccaatcgtttgtttagaacgattagctacagagtccaatgcttggctgactagcatattattatctttagaaattgtattcttcaatgaggcgtttatcatatctgtgatttcgttagtcatattacagtctgactgggttgtaatgttatccaacatatcacctatggatacggtacacgtaccagcatttgtaataatcctatctaagatgttgtatggcattgcgcagaaaatatcttctcctgtaatatttccactctcgataaatctactcagattattcttaaatgccttattctctggagaaaagatatcagtgtccatcatttcattaatagtatacgcagaaaagataccacgagtatcaattctatccaagatacttatcggttccgagtcacagataatggtttcctctccttcgggagatcctgcatagaaatatctaggacaatagtttctatactgtctgtaactctgataatctctaaagtcactaactgataccatgaaattgagaagatcaaacgctgaagtaattaatttttctgcctcgtttttactacaactagttttcatcaatgtagtgacgatgtattgtttagttacttttggtctaatactgatgatagagatattattacttcccataatggatcttctagtagtcaccttaaagcccattgatgcaaatagcagatagataaagtcttggtatgactcctttctaatatagtacggactacctttgtcacccaactttatacccacataagccataacaacctctttaatagccgtttcatgaggtttatcagccatgagcctgagtagttggaagaatctcatgaatcctgtctcagaaagtcctatatgcatgatagatttatctttcctgggaaactctcgtatagtcatagatgaaatactcttcaaagtttctgaaataagattagtaacagtcttacctccgactactctaggtaacaaacaaactctaataggtgttttctctgcggagataatatcagaaaggatagagcaataagtagtattattgtgattataaagaccgaatacataacaggtagaatttataaacatcatgtcctgaaggtttttagacttgtattcctcgtaatccataccgtcccaaaacatggatttggtaactttgatagccgtagatctttgttccttcgccaacaggttaaagaaattaataaagaatttgtggtttctacctatgtctacaaattgcacgtttggaagcgccacggttacattcactgcagcattttgaggatcgcgagtatgaagtacgatgttattgtttactggtatatctggaaagaattctaccagtctaggaataagagattgatatcgcatagaaatacaaaagttcataatctcatcatctaagagcattttgttaccattgtaataaatatccactctgtcatatgtataaatgaagtactgttcaaacatgatgagatgtttatatgttggcatagtagtgagatctacgtttggtaatggcaatgtattaagattaactccataatgtctagcagcatctgcgatgttataagcgttgtcaaagcggggtcgatcttgtgctgttatatattgtctaacacctataagattatcaaaatcttgtctgcttaatacaccgttaacaatttttgccttgaattcttttattggtgcattaataacatccttatagaggatgttaaacaaataagtgttatcaaagttaagatctggatatttcttttctgctagaacatccattgagtcggagccatctggtttaatataaccaccgataaatctagctctgtattctgtatccgtcaatctaatattaagaaggtgttgagtgaaaggtggaagatcgtaaaagctgtgagtattaatgataggattagtttccgaactaatgttaattggggtattaataatatctatatttccagcgttaagtgtaacattaaacagttttaattcacgtgacgtggtatcaattaaataattaatgcccaatttggatatagcagcctgaagctcatcttgtttagttacggatcctaatgagttattaagcaatatatcgaacggatgaacgaaggttgttttaagttggtcacatactttgtaatctagacatagatgcggaagaacggtagaaactatacgaaataaatattcagagtcctctaattgatcaagagtaactattgacttaataggcatcatttatttagtattaaatgacgaccgtaccagtgacggatatacaaaacgatttaattacagagttttcagaagataattatccatctaacaaaaattatgaaataactcttcgtcaaatgtctattctaactcacgttaacaacgtggtagatagagaacataatgccgccgtagtgtcatctccagaggaaatatcctcacaacttaatgaagatctatttccagatgatgattctccggccactattatcgaacgagtacaacctcatactactattattgacgatactccacctcctacgtttcgtagagagttattgatatcggaacaacgtcaacaacgagaaaaaagatttaatattacagtatcgaaaaatgctgaagcaataatggaatctagatctatgatatcttctatgccaacacaaacaccatccttgggagtagtttatgataaagataaaagaattcagatgttggaggatgaagtggttaatcttagaaatcaacgatctaatacaaaatcatctgataatttagataattttaccagaatactatttggtaagactccgtataaatcaacagaagttaataagcgtatagccatcgttaattatgcaaatttgaacgggtctcccttatcagtcgaggacttggatgtttgttcagaggatgaaatagatagaatctataaaacgattaaacaatatcacgaaagtagaaaacgaaaaattatcgtcactaacgtgattattattgtcataaatattatcgagcaagcattgctaaaactcggatttgaagaaatcaaaggactgagtaccgatatcacttcagaaattatcgatgtggagatcggagatgactgcgatgctgtagcatcaaaactaggaatcggtaacagtccggttcttaatattgtattgtttatactcaagatattcgttaaacgaattaaaattatttaatttaatacattcccatatccagacaacaatcgtctggattaatctgttcctgtcgtctcataccggacgacatattaatctttttattagtaggcatctttttagatggtttctttttcccagcattaactgagtcgatacctagaagatcgtgattgatctctccgaccattccacgaacttctaattggccgtctctgacggtaccataaactattttaccagcattagtaacagcttggacaatctgaccatccattgcgttgaatgatgtagttgctgttgttctacgtttaggagcaccagaagtatttttggagcccttggatgttgatgtagaagaagacgaggattttgattttggtttacatgtaatacattttgaactctttgattttgtatcacatgcgccggcagtcacatctgtttgagaattaagattattgttgcctcctttgacggctgcatctccaccgatttgcgctagtagatttttaagctgtggtgtaatcttattaactgtttcgatataatcatcgtaactgcttctaacggctaaattttttttatccgccatttagaagctaaaaatatttttatttatgcagaagatttaactagattatacaatgaactaatatgatccttttccagattatttacaaacttggtatttcttggttctggaggaggcgaatttaaattcggacttggattcggattttgtgagttcttgatcttattatacagcgcatataggatggcgacggtaactgctacgcaaataccgatcaacaaaagaataccaatcatttattgacaataacttcactattgatcaagtatgcaatatatcatcttttcactaaataagtagtaataatgattcaacaatgtcgagatatatggacgataataacttagttcacggaaatatcgctatgattggtgtgaatgactccgctaactctgtggggcgcgcagtgctttccccacatagaataaattagcattccgactgtgataataataccaagtataaacgccataatactcaatactttccatgtacgagtgggactggtagacttactaaagtcaataaaggcgaagatacacgaaagaatcaaaagaatgattccagcgattagcacgccggaaaaataatttccaatcataagcatcatgtccatttaactaataaaaattttaaatcgccgaatgaacaaagtggaatataaaccatataaaaacaatagtttgtactgcaaaaataatatctatttttgttttcgaagatatggtaaaattaaatagtagtacacagcatgttataactaacagcagcaacggctcgtaattacttatcatttactagacgaaaaggtggtgggatattttcttgctcaaataatacgaatatatcacccatccattttatgcgatgtttatatactctaatctttaatagatctatagacgacgggtttaccaacaatatagattttatcgattcatctaatttaaacccttccttaaacgtgaatgatctattatctggcataacgatgactctacctgatgaatcggacaatgtactgggccatgtagaataaattatcaacgaattatcgtctacgaacatttatatcatttgttttaattttaggacgcgaataaatggatataaaatagaaaataacagatattacaaccagtgttatggccgcgcccaaccaggtaggcagttttattttatcttttactacaggttctcctggatgatgtacgttaccaactgcagacgtagttctagtacaattagacgtaagttccgcttgggaattttttaacgctaaagagttaacgttaatcgtgcacccaacgtatttacatctagttctttgaacatcttgattataatataaccattttctatctctagattcgtcggtgcactcatgtaaccaacataccctaggtcctaaatatttatctccggaattagattttggataattcgcgcaccaacaatttctatttcctttatgatcgttacaaaagacgtataatgccgtatccccaaaagtaaaataatcaggacgaataattctaataaactcagaacaatatctcgcatccatatgtttggagcaaatatcggaataagtagacatagccggtttccgttttgcacgtaaccattctaaacaattggggtttccaggatcgtttctacaaaatccagtcatgaaatcgtcacaatgttctgtcttgtaattattattaaatatttttggacagtgtttggtatttgtcttagaacaacattttgctacgctatcactatcgcccaggagataatccttttttataaaatgacatcgttgcccggatgctatataatcagtagcgtgttttaaatccttaatatattcaggagttacctcgttctgataatagattaatgatccaggacgaaatttgaaagaactacatggttctccatgaattaatacatattgtttagcaaattcaggaactataaaactactacaatgatctatcgacataccatctatcaaacaaaacttgggtttaatttctcccggagatgtttcataatagtacgtataactttcttctgcaaacttaacagctctattatattcaggataattaaaacctaattccatatatttgtctcgtatatctgctattcctggtgctattttgattctattaagagtaacggctgcccccatttttaataatcgtcagtatttaaactgttaaatgttggtatatcaacatttaccttatttcccgcagtataaggtttgttgcaggtatactgttcaggaatggttacatttatactttttctatagtcctgtctttcgatgttcatcacatatgcaaagaacagaataaacaaaataatgtaagaaataatattaaatatctgtgaattcgtaaatacattgattgccataataattacagcagctacaatacatacaatagacattcccacagtgttgccattacctccacgatacatttgagttactaagcaataggtaataactaagctagtaagaggcaatagaaaagatgagataaatatcatcaatatagagattagaggagggctatatagagccaagacgaacaaaatcaaaccgagtaacgttctaacatcattatttttgaagattcccaaataatcattcattcctccataatcgttttgcatcatacctccatctttaggcataaacgattgctgctgttcctctgtaaataaatctttatcaagcactccagcacccgcagagaagtcgtcaagcatattgtaatatcttaaataactcatttatatattaaaaaatgtcactattaaagatggagtataatctttatgccgaactaaaaaaaatgacttgtggtcaacccctaagtctttttaacgaagacggggatttcgtagaagttgaaccgggatcatcctttaagtttctgatacctaagggattttacgcctctccttccgtaaagacgagtctagtatttgaaacattaacaacgaccgataataaaattactagtatcaatccaacaaatgcgccaaagttatatcctcttcaacgcaaagtcgtatctgaagtagtttctaatatgaggaaaatgatcgaatcaaaacgtcctctatacatcactcttcacttggcgtgtggatttggtaagactattaccacgtgttatcttatggctacacacggtagaaaaaccgtcatttgcgtacccaataaaatgttaatacatcaatggaagacacaggtagaggcagtcggattggaacataagatatccatagatggagtaagtagtctattaaaggaactaaagactcaaagtccggatgtattaatagtagtcagtagacatctgacaaacgatgccttttgtaaatatatcaataagcattatgatttgttcatcttggatgaatcacatacgtataatctgatgaacaatacagcagttacaagatttttagcgtattatcctccgatgatgtgttattttttaactgctacacctagaccatctaacagaatttattgtaacagtattattaatattgccaagttatccgatctaaaaaaaactatctatgcagtagatagtttttttgagccatattccacagataatattagacatatgataaaacgattagatggaccatctaataaatatcatatatataccgagaagttattatctgtagacgagcctagaaatcaacttattcttaataccctggtagaagaattcaagtcaggaactattaatcgcattttagttattactaaactacgtgaacatatggtattcttctacaaacgattattagattttttcggatcagaggttgtatttataggagacgcccaaaatagacgtactccagatatggtcaaatcaatcaaggaactaaatagatttatattcgtatccaccttattttattccggtactggtttagatattcctagtttggattctttgttcatttgctcggcagtaatcaacaatatgcaaatagagcaattactagggagggtatgtcgagaaacagaactattagataggacggtatatgtatttcctagcacatccatcaaagaaataaagtacatgataggaaatttcgttcaacgaattattagtctgtctgtagataaactaggatttaaacaaaaaagttatcggaaacatcaagaatccgatcccacttctgtatgtacaacatcctccagagaagaacgtgtattaaatagaatatttaactcgcaaaatcgttaagaagtttaagcgacgatccgcatgctgcgcaggccagtgtattacccctcatagtattaatataatccaatgatacttttgtgatgtcggaaatcttaaccaatttagactgacaggcagaacacgtcatgcaatcatcatcgtcatcgataactgtagtcttgggcttctttttgcggctcttcattccggaacgcacattggtgctatccatttaggtagtaaaaaataagtcagaatatgccctatagcacgatcgtgcaaaacctggtatatcgtctctatctttatcacaatatagtgtatcgacatctttattattattgacctcgtttatcttggaacatggaatgggaacatttttgttatcaacggccacctttgccttaattccagatgttgtaaaattataactaaacagtctatcatcgacacaaatgaaattcttgtttagacgtttgtagtttacgtatgcggctcgttcgcgtctcattttttcagatattgcaggtactataatattaaaaataagaatgaaataacataggattaaaaataaagttatcatgacttctagcgctgatttaactaacttaaaagaattacttagtctgtacaaaagtttgaaattttcagattctgcggctatagaaaagtataattctttggtagaatggggaacatctacttactggaaaataggcgtgcaaaaggtagctaatgtcgagacgtcaatatctgattattatgatgaggtaaaaaataaaccgtttaatattgatccgggctattacattttcttaccggtatattttgggagcgtctttatttattcgaagggtaaaaatatggtagaacttggatctggaaactcttttcaaataccagatgatatgcgaagtgcgtgtaacaaagtattagacagcgataacggaatagactttctgagatttgttttgttaaacaatagatggataatggaagatgctatatcaaaatatcagtctccagttaatatatttaaactagctagtgagtacggattaaacatacccaaatatttagaaattgaaatagaggaagacacattatttgacgacgagttatactctattatagaacgctctttcgatgataaatttccaaaaatatccatatcgtatattaagttgggagaacttaggcggcaagttgtagactttttcaaattctcattcatgtatattgagtccatcaaggtagatcgtataggagataatatttttattcctagcgttataacaaaatcaggaaaaaagatattagtaaaagatgtagaccatttaatacgatccaaggttagagaacatacatttgtaaaagtaaaaaagaaaaacacattttccattttatacgactatgatggaaacggaacagaaactagaggagaagtaataaaacgaattatagacactataggacgagactattatgttaacggaaagtatttctctaaggttggtagtgcaggcttaaagcaattgactaataaattagatattaatgagtgcgcaactgtcgatgagttagttgatgagattaataaatccggaactgtaaaacgaaaaataaaaaaccaatcagcatttgatttaagcagagaatgtttgggatatccagaagcggattttataacgttagttaataacatgcggttcaaaatagaaaattgtaaggttgtaaatttcaatattgaaaatactaattgtttaaataacccgagtattgagactatatatggaaactttaaccagttcgtctcaatctttaatatcgtcaccgatgtcaaaaaaagattattcgagtgaaataatatgcgcctttgatataggtgcaaaaaatcctgccagaactgttttagaagtcaaggataactccgttagggtattggatatatcaaaattagactggagttctgattgggaaaggcacatagctaaagatttgtcacaatatgaatacactacagttcttctagaacgtcagcctagaaggtcgccgtacgtcaaatttatctattttattaaaggctttttatatcatacatcggctgccaaagttatttgcgtctcgcctgtcatgtctggtaattcatatagagatcgaaaaaagagatcggtcgaagcatttcttgattggatggacacattcggattgcgagactccgttccggatagacgcaaattagacgatgtagcggatagtttcaatttggctatgagatacgtattagataaatggaatactaattatacaccttataataggtgtaaatctagaaattacataaaaaaaatgtaataacgttagtaacgccattatggataatctatttacctttctacatgaaatagaagatagatatgccagaactatttttaactttcatctaataagttgcgatgaaataggagatatatatggtcttatgaaagaacgcatttcctcagaggatatgtttgataatatagtgtataataaagatatacatcatgccattaagaaactagtgtattgcgacatccaacttactaaacacattattaatcagaatacgtatccggtatttaacgattcttcacaagtgaaatgttgtcattatttcgatataaactcagataatagcaatattagctctcgtacagtagagatatttgagagggaaaagtcatctcttgtatcatatattaaaactaccaataagaagagaaaggtcaattatggggaaataaagaaaactgtacatggaggcactaatgcaaattacttttccggtaaaaagtctgatgagtatctgagcactacagtcaggtccaacattaatcaaccttggatcaaaaccatttctaagagaatgagagtagatatcattaatcactctatagtaacgcgtggaaaaagctctatattacaaactatagaaattatttttactaatagaacatgtgtgaaaatattcaaggattctactatgcacattattctatccaaggacaaggatgaaaaggggtgtatacacatgattgacaaattattctatgtctattataatttatttctgttgttcgaggatatcatccaaaacgagtactttaaagaagtagctaatgttgtaaaccacgtactcacggctacggcattagatgagaaattattcctaattaagaaaatggctgaacacgatgtttatggagttagcaatttcaaaatagggatgtttaacctgacatttattaagtcgttggatcataccgttttcccctctctgttagatgaggatagcaaaataaagttttttaaggggaaaaagctcaatattgtagcattacgatctctggaggattgtataaattacgtgactaaatccgagaatatgatagaaatgatgaaggaaagatcgactattttaaatagcatagatatagaaacggaatcggtagatcgtctaaaagaattgcttctaaaatgaaaaaaaaacactaattcagaaatggatcaacgactcggatataagtttttggtgcctgatcctaaagccggagttttttatagaccgttacatttccaatatgtatcgtattctaattttatattgcatcgattgcatgaaatcttgaccgtcaagcggccactcttatcgtttaagaataatacagaacgaattatgatagaaattagcaatgttaaagtgactcctccagattactcacctataatcgcgagtattaaaggtaagagttatgacgcattagccacgttcactgtaaatatctttaaagaggtaatgaccaaagagggtatatccatcactaaaataagtagttatgagggaaaagattctcatttgataaaaattccgctactaataggatacgggaataaaaatccacttgatacagccaagtatcttgttcctaatgtcataggtggagtctttatcaataaacaatctgtcgaaaaagtaggaattaatctagtagaaaagattacaacatggccaaaatttagggttgttaagccaaactcattcactttctcgttttcctccgtatcccctcctaatgtattaccgacaagatatcgccattacaagatatctctggatatatcacaattggaagcgttgaatatatcatcgacaaagacatttataacggtcaatattgttttgctgtctcaatatttatctagagtgagtctagaattcattagacgtagtttatcatacgatatgcctccagaagttgtctatctagtaaacgcgataatagatagtgctaaacgaattactgaatctattactgactttaatattgatacatacattaatgacctggtggaagctgaacacattaaacaaaaatctcagttaacgatcaacgagttcaaatatgaaatgctgcataactttttacctcatatgaactatacacccgatcaactaaagggattttatatgatatctttactaagaaagtttctctactgtatctaccacacttctagatatccagatagagattcgatggtttgtcatcgcatcctaacgtacggcaaatattttgagacgttggcacatgatgaattagagaattacataggcaacatccgaaacgatatcatgaacaatcacaagaacagaggcacttacgcggtaaacattcatgtactaacaactcctggacttaatcatgcattttctagtctattgagtggaaagttcaaaaagtcagacggtagttatcgaacacatcctcactattcatggatgcagaatatttctattcctaggagtgttggattttatccggatcaagtaaagatttcaaagatgttttctgtcagaaaataccatccaagtcaatatctttacttttgttcatcggacgttccggaaagaggtcctcaggtaggtttagtatctcaattgtctgtcttgagttccattacaaatatactaacgtctgagtatttggatttggaaaagaaaatttgtgagtatatcagatcatattataaagatgatataagttactttgaaacaggatttccaatcactatagaaaatgctctagtcgcatctcttaatccaaatatgatatgtgattttgtaactgactttagacgtagaaaacggatgggattcttcggtaacttggaggtaggtattactttagttagggatcacatgaatgaaattcgcattaatattggagcgggaagattagtcagaccattcttggttgtggataacggagagctcatgatggatgtgtgtccggagttagaaagcagattagacgacatgacattctctgacattcagaaagagtttccgcatgtcatcgaaatggtagatatagaacaatttacttttagtaacgtatgtgaatcggttcaaaaatttagaatgatgtcaaaggatgaaagaaagcaatacgatttatgtgactttcctgccgaatttagagatggatatgtagcatcttcactagtgggaatcaatcacaattctggacccagagctattcttggatgtgctcaagctaaacaagctatctcttgtctgagctcggatatacgaaataaaatagacaatggaattcatttgatgtatccagagaggccaatcgtgattagtaaggctttagaaacttcaaagattgcggctaattgcttcggccaacatgttactatagcattaatgtcgtacaaaggtatcaatcaagaggatggaattatcatcaaaaaacaatttattcagagaggcggtctcgatattgttacagccaagaaacatcaagtagaaattccgttggaaaactttaataacaaagaaagagataggtctaacgcctattcaaaattagaaagtaatggattagttagactgaatgctttcttggaatccggagacgctatagcacgaaatatctcatcaagaactcttgaagatgattttgctagagataatcagattagctttgatgtttccgaaaaatataccgatatgtacaaatctcgcgttgaacgagtacaagtagaacttactgacaaagttaaggtacgagtattaaccatgaaagaaagaagacccattctaggagacaaatttaccactagaacgagtcaaaagggaacagtcgcgtatatcgcggatgaaacggaacttccatacgatgaaaatggtatcacaccagatgtcattattaattctacatccatcttctctagaaaaactatatctatgttgatagaggttattttaacagccgcatattctgctaagccgtacaacaataagggagaaaaccgacctgtctgttttcctagtagtaacgaaacatccatcgatacatatatgcaattcgctaaacaatgttatgagcattcaaatccgaaattgtctgatgaagaattatcggataaaatcttttgtgaaaagattctctatgatcctgaaacggataagccttatgcatccaaagtattttttggaccaatttattacttgcgtctgaggcatttaactcaggacaaggcaaccgttagatgtagaggtaaaaagacgaagctcattagacaggcgaatgagggacgaaaacgtggaggaggtatcaagttcggagaaatggagagagactgtttaatagcgcatggtgcagccaatactattacagaagttttgaaagattcggaagaagattatcaagatgtgtatgtttgtgaaaattgtggagacatagcagcacaaatcaagggtattaatacatgtcttagatgttcaaaacttaatctctctcctctcttaacaaaaattgataccacacacgtatctaaagtatttcttactcaaatgaacgccagaggcgtaaaagttaaattagatttcgaacgaaggcctccttcgttttataaaccattagataaagttgatctcaaaccgtcttttctggtctaatattgtttagtagatacttatcaacatcatcaagattatcaagattatcaagattatcaagataagctaattcactaaacacattatcgatttcggtatcgttactcgcagaataaagttcgttatgatcctgatattcggaaatctgtggagtttcaggttttggtggatgtgtaacagctacttgagataccgaagtctgatattcagaaagctgtggatgttctggttcggcatccaccgatggtgttacaccactactaattggttcagtaacgtctgtggacgatggaggcaccacttctacaggttctggttctttatcctcagtcatcaacggagctacttcaatgcgaggaaatgtataatttggtaatggtttctcgtgtggatctgaagaagaggtaagatatctactagaaagataccgatcacgttctagttctcttttgtagaacttaactttttctttctcagcatctagttgatattccaacctcttcacgttactacgttcagatttcaattcacgttcgcatgggttacctccgcagtttttacgagcgatttcacgttcagccttcatgcgtctctccctctctctatcgagtttatcagagcagtctttctgaaggcgatcgaactccataaatttctccaacgctttgattgtttccatagatttccgaagttcagcttttaggactgtgattctttttctttcgaattcacagctggatgtacaaccgtttccattaccgccatctctaagtttcttttctagatcggcaacatttcatccccatgccttttacattcctcgagtctactgtcgtcgaaatatcgttccagctccttttcgacatcaataactttagcacgttgtctctcaagctctcttttgtagttatctgattccctggcacgtttaagatcttcatgcaattgagtcagctcttaacacaatctcttgcttcttcgtcatagtacgcgcaatcactgtgagatccattgttaccacgtctacactcggcgagctcgcgtttaagagattcaatttcccgtttgtattggtccatgtttccattgctaccaccattagatttacaggctgctagttgtcgttcgagatcagaaatacgggttttcttggaattgatttcgtcgatgtacttggcatcgaaacacttattaagttctttttccaattctacgattttatttctttcgcgagtcaattccctcctgtagtaactatctgttttgtcagattcacgctctctacgtagactttcttgcaagttactaatttgttccctagcacgtccgagtttagttttatatgctgaatagagttctgattcatcctttgagcagatctctagagatcgttcaagatccctgattctagtctttagcctatttacctcctcggaagatgctccgttaccgttgcgtttacactcgttaagctgtctatcaagatccatgattctatctctaagacgttgcatctctctttccatatcagcattgctttcattattacgtctgcagtcactcaactgtctttcaatatctgagattctatctctaagacgtcgcatctctctctgtttcggcattggtttcattattacgtctacagtcgttcaactgtctttcaagatctgatattctagattggagtctgctaatctctgtagcattttcacggcattcactcagttgtctttcaagatctgagattttagattggagtctgctaatctctgtaagatttcctcctccgctctcgatgcagtcggtcaacttattctctagttctctaatacgcgaacgcagtgcatcaacttcttgcgtgtcttcctggttgcgtgtacattcatcgagtctagattcgagatctctaacgcgtcgtcgttcttcctcaagttctctgcgtactacagaaagcgtgtccctatcttgttgatatttagcaatttctgattctagagtactgattttgcttacgtagttactaatatttgtcttggccttatcaagatcctccttgtatttgtcgcattccttgatatccctacgaagtctggacagttcccattcgacattacgacgtttatcgatttcagctcggagatcgtcatcgcgttgttttagccacatacgactgagttcaagttctcgttgacaagatccatctacttttccattcctaatagtatccagttccttttctagttctgaacgcatttctcgttccctatcaagcgattctctcaattctcggatagtcttcttatcaatttctaataaatctgaaccatcatctgtcccattttgaatatccctgtgttctttgatctcttttgtaagtcggtcgattctttcggttttataaacagaatccctttccaaagtcctaatcttactgagtttatcactaagttctgcattcaattcggtgagttttctcttggcttcttccaactctgttttaaactctccactatttccgcattcttcctcgcatttatctaaccattcaattagtttattaataactagttggtaatcagcgattcctatagccgttcttgtaattatgggaacataattaggatcttctaatggattgtatggcttgatagcatcatctttatcattattagggggatggacaaccttaattggttggtcctcatctcctccagtagcgtgtggttcttcaataccagtgttagtaataggcttaggcaaatgcttgtcgtacgcgggcacttcctcatccatcaagtatttataatcgggttctacttcagaatattcttttctaagagacgcgacttcgggagttagtagaagaactctgtttctgtatctatcaacgctggaatcaatactcaagttaaggatagcgaatacctcatcgtcatcatccgtatcttctgaaacaccatcatatgacatttcatgaagtctaacgtattgataaacagaatcagatttagtattaaacagatccttaacctttttagtaaacgcatatgtatattttagatctccagatttcataatatgatcacatgccttaaatgtcagtgcttccatgatataatctggaacactaatgggtgacgaaaaagatacagcaccatatgctacgttgataaataaatctgaaccactaagtagataatgattaatgttaaggaagaggaaatattcagtatatagatatgccttagcatcatatcttgtactaaacacgctaaacagtttattgatgtgatcaatttccaacagaataattagagcagcgggaataccaacaaacatattaccacatccgtattttctatgaatatcacatattatgttaaaaaatcttgatagaagagcgaatatctcgtctgacttaatgagacgtagttcagcagcagcataagtcataactgtaaatagaacatactttcctgtagtgttgattctagactccacatcaacaccattattaaaaatagttttatatacatctttaatctgctctccgttaatcgtcgaacgttctagtatacggaaacactttgatttcttatctgtagttaatgacttagtgatatcacgaagaatattacgaattacatttcttgtttttcttgagagacctgattcagaactcaactcatcgttccatagtttttttacctcagtggcgaaatctttggagtgcttggtacatttttcaataaggttcgtgacctccatttattataaaaaattttattcaaaacttaactacaatcgggtaattataaaatcgtagatctcccatgtggtggaatactaccatctatcgcatgtggatggacagtaggtaatggccatgggaacagtaatgtttgcatatttatctttcttgccagtattactgcatattgtcccaatgtttcgatgtgatgttctaacctatcaactgccgctgtatcacaacaatagtgtccgatgaaattaagattatgatccaatgtgtttaatatatgattatcaagtcttatacgatccgcgtcttttttgacaggatcaggttcttctacaggaagaagtttcggcctcttatgatattcatgtctgggaaacggtggtctagggtgaggctccggtatcggagtgggttttggattataatcatcatcgtctatgacatcatcttcgacttcgatatttattttgctatcttgatgatgtcctgtatcagttgcattttcagcactcgactgaatattagcgcattcattgtttattattaccatatttctaaacccaaaatgtatatgttgaacatcactactatcgttgatgagtcttatagcatgaattcgcttatcgttatcgggtttagcttctgtcaccttagcaattccttttttattaaactctacataatcatatccatttctattgtttgttctaatataaacgagtatagcatcattgctaaatttttcaatagtatcgaaaacagaatatcctaaaccatataatatatattcaggaacactcaaactaaatgtccaggattctcctaaatacgtaaactttaatagtgcgaaatcattcaaaaatctaccacttatagatagatagtacataaatgcgtatagtagtctacctatctctttattatgaaaaccggcattacgatcatatatgtcgtgatatacctgtgatccgtttacgttaaaccataaatacatgggtgatcctataaacatgaatttatttctaattctcagagctatagttaattgaccgtgtaatatttgcttacatgcatacttgatacgctcattaataagatttttatcattgctcgttatctcagaatcgtatatataaggagtaccatcgtgattcttaccagatattatacaaaatactatatataaaatatattgaccaacgttagtaatcatataaatgtttaacgttttaaattttgtattcaatgatccattatcatacgctagcatggtcttatgatattcattctttaaaatataatattgtgttagccattgcattggggctcctaatggagattttttattctcatccattttaggataggctttcataaagtccctaataacttcgtgaataatgtttctatgttttctactgatgcatgtatttgcttcgattttttttatcccatgtttcatctatcatagatttaaacgcagtaatgctcgcaacattaacatcttgaaccgttggtacaattccgttccataaatttataatgttcgccatttatataactcattttttgaatatacttttaattaacaaaagagttaagttactcatatggacgccgtccagtctgaacatcaatctttttagccagagatatcatagccgctcttagagtttcagcgtgattttccaacctaaatagaacttcatcgttgcgtttacaacacttttctatttgttcaaactttgttgttacattagtaatctttttttccaaattagttagccgttgtttgagagtttcctcattgtcgtctccatcggctttaacaattgcttcgcgtttagcctctggctttttagcagcctttgtagaaaaaaattcagttgctggaattgcaagatcgtcatctccggggaaaagagttccgtccatttaaagtacagattttagaaactgacactctgcgttatttatatttggtacaacacatggattataaatatcgatgttaataacatcagaaaatgtaaagtctatacattgttgcatcgtgttaaattttctaatggatctagtattattgggtccaacttctgcctgaaatccaaatatggaagcggatacaaaaccgtttcctggataaaccacacatctccacttttgctttacatcagaaattgtgtcattgacatcttgaactctcctatctaatgccggtgttccacctatagattttgaatattcgaatgctgcatgagtagcattaaattccttaatattgccataattttcatatattgagtaaccctggataaaaagtaaacacaccgcagccgtcgctaccacaataaaaaaaattgatagagagttcatttataatctattagaagctgacaaaatttttttacacgcatcagacaatgctttaataaatagttcaacatctacttttgtcatatcgaaccgatggtatgattctaacctagaattacatccgaaaaagttgactatgttcatagtcattaagtcattaacaaacaacattccagactctggattataagacgatactgtttcgtcacaatcacctaccttaatcatgtgattatgaatattggctattagagcaccttctaagaaatctataatatctttgaaacacgatttaaaatcaaaccacgaatatacttctacgaagaaagttagtttacccataggagagataactataaatggagatctagatacaaaatccggatctatgatagttttaacattattatattctctattaaatacctccacatctaaaaatgttaattttgaaactatgtcttcgtttattaccgtacctgaactaaacgctataagctctattgtttgagaactctttaaacgatattcttgaaatacatgtaacaaagtttcctttaactcggtcggtttatctaccatagttacagaatttgtatccttatctataatataataatcaaaatcgtataaagttatataattatcgcgttcagattgtgatcttttcaaatagactaaaaaccccatttctctagtaagtatcttatgtatatgtttgtaaaatatcttcatggtgggaatatgctctaccgcagttagccattcctcattgacagcggtagatgtattagacaaaactattccaatgtttaacaagggccattttacgagattattaaatccttgtttgataaatgtagccaatgagggttcgagttcaacgacgattgaattctcttcccgcggatgctgcatgatgaacgacgggatgttgttcgattgatttggaattctttttcgactttttgtttatattaaatattttaaaatttatagcggatagcaattcatgtaccacggataatgtagacgcgtattgcgcatcgatatctttattattagataaatttatcaataaatgtgagaagtttgcctcgttaaggtcttccatttaaatattatataaacatttgtgtttgtatcttattcgtcttttatggaatagttttttactagtaaagctgcaattacacactttgtccgtaaaacataaatataaacaccagcttttatcaatcgttccaaaaagtcgacggcggacatttttaacatggcatctattttaaatacacttaggtttttggaaaaaacatcattttataattgtaacgattcaataactaaagaaaagattaagattaaacataagggaatgtcatttgtattttataagccaaagcattctaccgttgttaaatacttgtctggaggaggtatatatcatgatgatttggttgtattggggaaggtaacaattaatgatctaaagatgatgctattttacatggatttatcatatcatggagtgacaagtagtggaacaatttacaaattgggatcgtctatcgatagactttctctaaataggactattgttacaaaagttaataattataattatgatacattttttgacgatgatgattgatcgctattgcacaattttgtttttttactttctaatatagcgtttagattctttttcatgtgcgaatattgatttactaaaatatctatgtttaacttttgttctataacgtccttatcggcggtatcggtacatatacgtaattcaccttcacaaaatacggagtcttcgataataatagccaatcgattattggatctagctgtctgtatcatattcaacatgtttaatatatcctttcgtttcccctttacaggcatcgatcgtagcatattttccgcgtctgagatggaaatgttaaaactacaaaaatgcgtaatgttagcccgtcctaatattggtacgtgtctataagtttggcatagtagaataatagacgtgtttaaatgccttccaaagtttaagaattctattagagtattgcattttgatagtttatcgcctacatcatcaaaaataagtaaaaagtgtgctgattttttatgattttgtgcgacagcaatacatttttctatgttacttttagttcgtatcagattatattctagagattcctgactactaacgaaattaatatgatttggccaaatgtatccatcataatctggattataaacgggtgtaaacaagaatacatgtttatattttttaactagtgtagaaaacagagatagtaaatagatagtttttccagatccagatcctcccgttaaaaccattctaaacggcatttttaataaattttctcttgaaaattgtttttcttggaaacaattcataattatatttacagttactaaattaatttgataataaatcaaaatatggaaaactaaggtcgttagtagggaggagaacaaagaaggcacatcgtgacataaataacatttattatcatgatgacaccagaaaacgacgaagagcagacatctgtgttctccgctactgtttacagagacaaaattcagggaaagaataaacgcaaacgcgtgattggtctatgtattagaatatctatggttatttcactactatctatgattaccatgtccgcgtttctcatagtgcgcctaaatcaatgcatgtctgctaacgaggctgctattactgacgccgctgttgccgttgctgctgcatcatctactcatagaaaggttgcgtctagcactacgcaatatgatcacaaagaaagctgtaatggtttatattaccagggttcttgttatatattacattcagactaccagttattctcggatgctaaagcaaattgcactgcggaatcatcaacactacccaataaatccgatgtcttgactacctggctcattgattatgttaaggatacatggggatctgatggtaatccaattacaaaaactacatccgattatcaagattctgatgtatcacaagaagttagaaagtatttttgtgttaaaacaatgaactaatatttatttttgtacattaataaatgaaatcgcttaatagacaaactgtaagtaggtttaagaagttgtcggtgccggtcgctataatgatgatactctcaaccattattagtggcataggaacatttctgcattacaaagaagaactgatgcctagtgcttgcgccaatggatggatacaatacgataaacattgttatttagatactaacattaaaatgtctacagataatgcggtttatcagtgtcgtaaattacgagccagattgcctagaccggatactagacatctgagagtattgtttagtattttttataaagattattgggtaagtttaaaaaagaccaataataaatggttagatattaataatgataaagatatagatattagtaaattaacaaattttaaacaactaaacagtacgacggatgctgaagcgtgttatatatacaagtctggaaaactggttgaaacagtatgtaaaagtactcaatctgtactatgtgttaaaaaattctacaagtgacaacaaaaaatgaattaataataagtcgttaacgtacgccgccatggacgccgcgtttgttattactccaatgggtgtgttgactataacagatacattgtatgatgatctcgatatctcaatcatggactttataggaccatacattataggtaacataaaaactgtccaaatagatgtacgggatataaaatattccgacatgcaaaaatgctactttagctataagggtaaaatagttcctcaggattctaatgatttggctagattcaacatttatagcatttgtgccgcatacagatcaaaaaataccatcatcatcatagcatgcgactatgatatcatgttagatatagaagataaacatcagccattttatctattcccatctattgatgtttttaacgctacaatcatagaagcgtataacctgtatacagctggagattatcatctaatcatcaatccttcagataatctgaaaatgaaattgtcgtttaattcttcattctgcatatcagacggcaatggatggatcataattgatgggaaatgcaatagtaattttttatcataaaagttgtaaagtaaataataaaacaataaatattgaactagtagtacgtatattgagcaatcagaaatgatgctggtacctcttatcacggtgaccgtagttgcgggaacaatattagtatgttatatattatatatttgtaggaaaaagatacgtactgtctataatgacaataaaattatcatgacaaaattaaaaaagataaagagttctaattccagcaaatctagtaaatcaactgatagcgaatcagactgggaggatcactgtagtgctatggaacaaaacaatgacgtagataatatttctaggaatgagatattggacgatgatagcttcgctggtagtttaatatgggataacgaatccaatgttatggcgcctagcacagaacacatttacgatagtgttgctggaagcacgctgctaataaataatgatcgtaatgaacagactatttatcagaacactacagtagtaattaatgaaacggagactgttgaagtacttaatgaagataccaaacagaatcctaactattcatccaatcctttcgtaaattataataaaaccagtatttgtagcaagtcaaatccgttcattacagaactcaacaataaatttagtgagaataatccgtttagacgagcacatagcgatgattatctaaataagcaagaacaagatcatgaacacgatgatatagaatcatcggtcgtatcattggtgtgattagtttcctttttataaaattgaagtaatatttagtattattgctgccgtcacgttgtacaaatggagatattccctgtattcggcatttctaaaattagcaattttattgctaataatgactgtagatattatatagatacagaacatcaaaaaattatatctgatgagatcaatagacagatggatgaaacggtacttcttaccaacatcttaagcgtagaagttgtaaatgacaatgagatgtaccatcttattcctcatagattatcgacgattatactctgtattagttctgtcggaggatgtgttatctctatagataatgacgtcaatggcaaaaatattctaacctttcccattgatcatgctgtaatcatatccccactgagtaaatgtgtcgtagttagcaagggtcctacaaccatactggttgctaaagcggatatacccagcaaacgattggtaacatcgtttacaaacgacatactgtatgtaaacaatctatcactgattaattatttgccgttgtctgtattcattattagacgagtcaccgactatttggatagacacatatgcgatcagatatttgctaataataagtggtattcccttataaccatcgacgataagcaatatcctattccatcaaattgtataggtatgtcttctgccaagtacataaattctagcatcgagcaagatactttaatacatgtttgtaacctcgagcatccattcgacttagtatacaaaaaaatgcagtcgtacaattctgtacctatcaaggaacaaatattgtacggtagaattgataatataaatatgagcattagtatttctgtggattaatagatttctagtatggggatcattaatcatctctaatctctaaatacctcataaaacgaaaaaaaagctattatcaaatactgtacggaatagattcattctcttctctttttatgaaactctgttgtatatctactgataaaactggaagcaaaaaatctgatagaaagaataagaataagatcaagatcaaggattatatggaacacgattattataaaataacaatagttcctggttcctcttccacgtctactagctcgtggtattatacacatgcctagtaatagtctctttgcgttgatggaaagcagactagaaataacaggctaaaatgttcagacaccataatagttcccaacccagataataacagagtaccatcaacacattcctttaaactcaatcccaaacccaaaaccgttaaaatgtatccggccaattgatagtagataatgaggtgtacagcgcatgataatttacacagtaaccaaaatgaaaatactttagtaattataagaaatatagatggtaacgtcatcatcaacaatccaataatatgccggagagtaaacattgacggataaaacaaaaatgctccgcataactctatcatggcaataacacaaccaaatacttgtaagattcctaaattagtagaaaatacaacggatatcgatgtataagtgatctcgagaaataataagaataaagtaatgcccgtaaagataaacatcaacattgtttggtaatcattaaaccaattagtatgacgttgaactaatttcacagtaaattttattccagtgttatcctcgcatgtataagtacctggtaagatatctttatattccataatcaatgagacatcactatctgataacgaatgaagtctagcactagtatgccatttacttaatattgtcgtcttggaagttttattataagttaaaatatcatggttatccaatttccatctaatatactttgtcggattatctatagtacacggaataatgatggtatcattacatgctgtatactctatggtctttgtagttgttataacaaccaacgtatagaggtatatcaacgatattctaactcttgacattttttatttatttaaaatgatacctttgttatttattttattctattttgctaacggtattgaatggcataagtttgaaacgagtgaagaaataatttctacttacttattagacgacgtattatacacgggtgttaatggggcggtatacacattttcaaataataaactaaacaaaactggtttagctaatactaattatatcacaacatctataaaagtagagaatgaggatacattagtatgcggaaccaataacggaaatcccaaatgttggaaaatagacggttcagacgacccaaaacatagaggtagaggatacgctccttatcaaaatagcaaagtaacgataatcagttacaacgaatgtgtactatctgacataaacatatcaaaagaaggaattaaacgatggagaagatttgacggaccatgtggttatgatttattcacggcggataacgtaattccaaaagatggtttacgaggagcattcgtcgataaagacggtacttatgacaaagtttacattcttttcactgatactatcggctcaaagagaattgttaaaattccgtatatagcacaaatgtgcctaaacgacgaaggtggtccatcatcattgtctagtcatagatggtcgacgtttctcaaagtcgaattagaatgtgatatcgacggaagaagttatagacaaattattcattctagaactataaaaacagataatgatacgatactatatgtattcttcgatagtccttattccaagtccgcattatgtacctattctatgaataccattaaacaatctttttctacgtcaaaattggaaggatatacaaagcaattgccgtctccagctcctggtatatgtctaccagctggaaaagttgttccacataccacgtttgaagtcatagaaaaatataatgtactagatgatattataaagcctttatctaaccaacctatcttcgaaggaccgtctggtgttaaatggttcgatataaaggagaaggaaaatgaacatcgggaatatagaatatacttcataaaagaaaattctatatattcgttcgatacaaaatctaaacaaactcgtagctcgcaagtcgatgcgcgactattttcagtaatggtaacttcgaaaccgttatttatagcagatatagggataggagtaggaatgccacaaatgaaaaaaatacttaaaatgtaatcttaatcgagtacaccacacgacaatgaacaaacataagacagattatgctggttatgcttgctgcgtaatatgcggtctaattgttggaattatttttacagcgacactattaaaagttgtagaacgtaaattagttcatacaccatcaatagataaaacgataaaagatgcatatattagagaagattgtcctactgactggataagctataataataaatgtatccatttatctactgatcgaaaaacctgggaggaaggacgtaatgcatgcaaagctctaaatccaaattcggatctaattaagatagagactccaaacgagttaagttttttaagaagcattagacgcggatattgggtaggagaatccgaaatattaaaccagacaaccccatataattttatagctaagaatgccacgaagaatggaactaaaaaacggaaatatatttgtagcacaacgaatactcccaaactgcattcgtgttacactatataacaattacactacatttttatcataccactacttcggttagatgttttagaaaaaaataaatatcgccgtaccgttcttgtttttataaaaataacaattaacaattatcaaattttttctttaatattttacgtggttgaccattcttggtggtaaaataatctcttagtgttggaatggaatgctgtttaatgtttccacactcatcgtatattttgacgtatgtagtcacatcgtttacgcaatagtcagactgtagttctatcatgcttcctacattagaaggaggaacagttttaaagtctcttggttttaatctattaccgttagttttcatgaaatcctttgttttatccacttcacattttaaataaatgtccactatacattcttttgttaattttactagatcgtcatgggtcatagaatttataggttccgtagtccatggatccaaactagcaaacttcgcgtatacggtatcgcgattagtgtatacaccaactgtatgaaaattaagaaaacagtttaataaatcaacagaaatatttaatcctccgtttgatacagatgcgccatatttatggatttcggattcacacgttgtttgtctgaggtgttcgtctagtgttgcttctacgtaaacttcgattcccatatattctttattgtcagaatcgcataccgatttatcatcatacactgtttgaaaactaaatggtatacacatcaaaataataaataataacgagtacattctgcaatattgttatcgtaattggaaaattagtgttcgagtgagtcggattatgtgagtactggattgtatattttattttatattttgtaataagaataaaatgctaatgtcaagtttattccaatagatgtcttattaaaaaacatatataataaataacaatggctgaatggcataaaattatcgaggatatctcaaaaaataataagttcgaggatgccgccatcgttgattacaagactacaaagaatgttctagctgctattcctaacagaacatttgccaagattaatccgggtgaaattattcctctcatcactaatcgtaatattctaaaacctcttattggtcagaaatattgtattgtatatactaactctctaatggatgagaacacgtatgctatggagttgcttactgggtacgcccctgtatctccgatcgttatagcgagaactcataccgcacttatatttttgatgggtaagccaacaacatccagacgtgacgtgtatagaacgtgtagagatcacgctacccgtgtacgcgcaactggtaattaaaataaaaagtaatattcatatgtagtatcaattttaaatgatgatgatgaaatggataatatccatattgacgatgtcaataatgccggtattggcatacagttcatcgatttttagatttcattcagaggatgtggaattatgttatgggcatttgtattttgataggatctataatgtagtaaatataaaatataatccgcatattccatatagatataattttattaatcgcacgttaaccgtagatgaactagacgataatgtcttttttacacatggttattttttaaaacacaaatatggttcacttaatcctagtttgattgtctcattatcaggaaacttaaaatataatgatatacaatgctcagtaaatgtatcgtgtctcattaaaaatttggcaacgagtacatctactatattaacatctaaacataagacttattctctacatcggtccacgtgtattactataataggatacgattctattatatggtataaagatataaatgacaagtataatgacatctatgattttactgcaatatgtatgctaatagcgtctacattgatagtgaccatatacgtgtttaaaaaaataaaaatgaactcttaattatgctatgctattagaaatggataaaatcaaaattacggttgattcaaaaattggtaatgttgttaccatatcgtataacttggaaaagataactattgatgttacacctaaaaagaaaaaagaaaaggatgtattattagcgcaatcagttgctgtcgaagaggcaaaagatgtcaaggtagaagaaaaaaatattatcgatattgaagatgacgatgatatggatgtagaaagcgcataatactatctataaacataagtatataataaatactttttatttacggtactcttgtagtggtgataccctactcaattatttttttaaaaaaatacttattctgattcttctagccatttccgtgttcgttcgaatgccacatcgacgttaaagataggggagtagttgaaatctagttctgcattgttggtacgcacctcaaatgtagtgttggatatcttcaacgtatagttgttgagtagtgatggttttctaaatagaattctcttcatatcattcttgcacgcgtacatttttagcatccatcttggaatcctagatccttgttctattcccaatggtttcatcaatagaagattaaacatatcgtacgaacacgatggagagtaatcgtagcaaaagtaagcatttcctttaatcttagatcccggatactggatatattttgcagccaacacgtgcatccatgcaacatttcctacatatacccggctatgcaccgcgtcatcatcgactgtacgatacataatgttaccgtgttgcttacattgctcgtaaaagactttcgtcaatttgtctccttctccgtaaattccagtgggtcttaggcaacaagtatacaattttgctccattcatgattacggaattattggctttcataaccagttgctcggccatacgtttactttttgcgtatacatgtcctggtgatatatcataaagggtatgctcatggccgatgaatggatcaccgtgtttatttggtcctattgcttccatgctactagtatagatcaaatacttgattcctaggtccacacaagctgccaatatagtctgtgttccataatagtttactttcatgatttcattatcggtgtattttccaaatacatccactagagcagccgtatgaataatcagatttaccccatctagcgcttctctcaccttatcaaagtcgtttatatcacattgtatatagtttataaccttaactttcgaggttattggttgtggatcttctacaatatctatgactctgatttcttgaacatcatctgcactaattaacagttttactatatacctgcctagaaatccggcaccaccagtaaccgcgtacacggccattgctgccactcataatatcagactacttattctattttactaaataatggctgtttgtataatagaccacgataatatcagaggagttatttactttgaaccagtccatggaaaagataaagttttaggatcagttattggattaaaatccggaacgtatagtttgataattcatcgttacggagatattagtcaaggatgtgattccataggcagtccagaaatatttatcggtaacatctttgtaaacagatatggtgtagcatatgtttatttagatacagatgtaaatatatctacaattattggaaaggcgttatctatttcaaaaaatgatcagagattagcgtgtggagttattggtatttcttacataaatgaaaagataatacattttcttacaattaacgagaatggcgtttgatatatcagttaatgcgtctaaaacaataaatgcattagtttacttttctactcagcaaaataaattagtcatacgtaatgaagttaatgatacacactacactgtcgaatttgatagggacaaagtagttgacacgtttatttcatataatagacataatgacaccatagagataagaggggtgcttccagaggaaactaatattggttgcgcggttaatacgccggttagtatgacttacttgtataataagtatagttttaaactgattttagcagaatatataagacacagaaatactatatccggcaatatttattcggcattgatgacactagatgatttggctattaaacagtatggagacattgatctattatttaatgagaaacttaaagtagactccgattcgggactatttgactttgtcaactttgtaaaggatatgatatgttgtgattctagaatagtagtagctctatctagtctagtatctaaacattgggaattgacaaataaaaagtataggtgtatggcattagccgaacatatatctgatagtattccaatatctgagctatctagactacgatacaatctatgtaagtatctacgcgggcacactgagagcatagaggatgaatttgattattttgaagacgatgattcgtctacatgttctgccgtaaccgacagggaaacggatgtataattttttttatagcgtgaaggatatgataaaaaatataattgttgtatttatcccattccaatcaccttatatgattctgtaaaaaaattatactgtaacacaatgaaggagtcttatagatgtatagaggtcagatactggtttgataaactgtttattccacataagtatgtttgactttatggttagacccgcatactttaacaaatcactgaaaattggagttaggtattgacctctcagaatcagttgccgttctggaacattaaatgtattttttatgatatactccaacgcatttatgtgggcatacaacaagtcattactaatggagtattccaagagttttagttgtctagtatttaacaagagaagagatttcaacagactgtttatgaactcgaatgccgcctcattgtcgcttatattgatgatgtcgaattctcccaatatcatcaccgatgagtagctcatcttgttatcgggatccaagttttctaaagatgtcattaaaccctcgatcatgaatggatttatcatcatcgtttttatgttggacatgagcttagtccgtttgtccacatctatagacgacgatttctgaattatttcatatatccctctctttaactccaggaacttgtcaggatggtctactttaatatgttctcgtctaagagatgaaaatctttggatggttgcacgcgacttttctctaaaggatgacgttgcccaagatcctctcttaaatgaatccatcttatccttggacaagatggacagtctattttccttagatggtttaatatttttgttacccatgatctataaaggtagacctaatcgtctcggatgaccatatatttattttcagttttattatacgcataaattgtaaaaaatatgttaggtttacaaaaatgtctcgtggggcattaatcgtttttgaaggattggacaaatctggaaaaacaacacaatgtatgaacatcatggaatcaataccttcaaacacaataaaataccttaactttcctcagagatccactgtcactggaaagatgatagatgactatctaactcgtaaaaaaacctataatgatcatatagttaatctattattttgtgcaaatagatgggagtttgcatcttttatacaagaacaactagaacagggaattactttaatagttgatagatacgcattttctggagtagcgtatgccgccgctaaaggcgcgtcaatgactctcagtaagagttatgaatctggattgcctaaacccgacttagttatattcttggaatctggtagcaaagaaattaatagaaacgtcggcgaggaaatttatgaagatgttacattccaacaaaaggtattacaagaatataaaaaaatgattgaagaaggagatattcattggcaaattatttcttctgaattcgaggaagatgtaaagaaggagttgattaagaatatagttatagaggctatacacacggttactggaccagtggggcaactgtggatgtaatagtgaaattacattttttataaatagatgttagtacagtgttataaatggatgaagcatattactctggcaacttggaatcagtactcggatacgtgtccgatatgcataccgaactcgcatcaatatctcaattagttattgccaagatagaaactatagataatgatatattaaacaaggacattgtaaattttatcatgtgtagatcaaacttggataatccatttatctctttcctagatactgtatatactattatagatcaagagatctatcagactgagttgattaattcattagacgacaatgaaattatcgattgtatagttaataagtttatgagcttttataaggataacctagaaaatatagtagatgctatcatcactctaaaatatataatgaataatccagattttaaaactacgtatgcagaagtactcggttccagaatagcggatatagatattaaacaagtgatacgtgagaatatactacaattgtctaatgatatccgcgaacgatatttgtgaaaaatattaaaaaaaaatactttttttattaaatgacgtcgcttcgcgaatttagaaaattatgctgtgatatatatcacgcatcaggatataaagaaaaatctaaattaattagagactttataacagatagggatgataaatatttgatcattaagctattgcttcccggattagacgatagaatttataacatgaacgataaacaaattataaaattatatagtataatatttaaacaatctcaggaagatatgctacaagatttaggatacggatatataggagacactattaggactttcttcaaagagaacacagaaatccgtccacgagataaaagcattttaactttagaagaagtggatagttttttaactacgttatcatccgtaactaaagaatcgcatcaaataaaattattgactgatatcgcatccgtttgtacatgtaatgatttaaaatgtgtagtcatgcttattgataaagatctaaaaattaaagcgggtcctcggtacgtacttaacgctattagtcctaatgcctatgatgtgtttagaaaatctaataacttgaaagagataatagaaaattcatctaaacaaaatctagactctatatctatttctgttatgactccaattaatcccatgttagcggaatcgtgtgattctgtcaataaggcgtttaaaaaatttccatcaggaatgtttgcggaagttaaatacgatggtgaaagagtacaagttcataaaaataataacgagtttgccttctttagtagaaacatgaaaccagtactctctcataaagtggattatctcaaagaatacataccgaaagcatttaaaaaagctacgtctatcgtattggattctgaaattgttcttgtagacgaacataatgtaccgctcccgtttggaagtttaggaatacacaaaaagaaagaatataaaaactctaacatgtgtttgttcgtgtttgactgtttgtactttgatggattcgatatgacggacattccattgtacgaacgaagatcttttctcaaagatgttatggttgaaatacccaatagaatagtattctcagagttgacgaatattagtaacgagtctcagttaactgacgtattggatgatgcactaacgagaaaattagaaggattggtcttaaaagatattaatggagtatacgaaccgggaaagagaagatggttaaaaataaagcgagactatttgaacgagggttccatggcagattctgccgatttagtagtactaggtgcttactatggtaaaggagcaaagggtggtatcatggcagtctttctaatgggttgttacgacgatgaatccggtaaatggaagacggtaactaaatgttccggtcacgatgataatacgttaagggagttgcaagaccaattaacgatgattaaaattaacaaggatcccaaaaaaattccagagtggttagtagttaataaaatctatattcccgattttgtagtagaggatccgaaacaatctcagatatgggaaatttcaggagcagagtttacatcttccaagtcacatacagcgaatggaatatcgattagatttcctagatttactaggattagagaagataaaacgtggaaagaatctactcatctaaacgatttagtaaacttgactaaatcttaatagttacatacaaattaaaataacactatttagttggtggtcgccatggatggtgttattgtatactgtctaaacgcgctagtaaaacatggcgaggaaataaatcatataaaaaatgatttcatgattaaaccatgttgtgaaagagtttgtgaaaaagttaagaacgttcacatcgacggacaatctaaaaacaatacagtgattgcagatttgccatatctggataatgctgtatcggatgtatgcaaatcgatatatatatatatatagtatcaagaatatccagatttgctaatttgataaagatagatgacgatgacaagactcctactggtgtatataattattttaaacctaaagatgccattcctgttattatatccataggaaaggatagagatgtttgtgaactattaatctcatctgataaagcgtgtgcgtgtatagagttaaattcatatcacgtagccattcttcccatgaatgtttccttttttaccaaaggaaatgcctcgttgattattctcctgtttgatttctctatcgatgcagcacctctcttaagaagtgtaaccgataataatgttattatatctagacactagcgtctacatgacgagcttccgagttccaattggttcaagttttacataagtataaagtccgactattgttctatattatatatggttgttgatggatctgtgatgcatgcgatagctgataatagaacttacgcaaatattagcaaaaatatattagacaatactacaattaacgatgagtgtagatgctgttattttgaaccacagattaggattcttgatagagatgagatgctcaatggatcatcgtgtgatatgaacagacattgtattatgatgaatttacctgatgtaggcaaatttggatctagtatgttggggaaatatgaacctgacatgattaagattgctctttcggtggctggtaatttaataagaaatcgagactacattcccgggagacgaggatatagctactacgtttacggtatagcctctagataatttttttaagcacgaaataaaaaacataattttaaaccaatctatttcatactattttgtgtgatcaccatggacataaagatagatattagtatttctggtgataaatttacggtgactactaggagggaaaatgaagaaagaaaaaaatatctacctctccaaaaagaaaaaactactgatgttatcaaacctgattatcttgagtacgatgacttgttagatagagatgagatgtctactattctagaggaatattttatgtacagaggtctattaggcctcagaataaaatatggacgactctttaacgaaattaaaaaattcgacaatgatgcggaagaacaattcggtactatagaagaactcaagcagaaacttagattaaattctgaagagggagcagataactttatagattatataaaggtacaaaaacaggatatcgtcaaacttactgtatacgattgcatatctatgataggattgtgtgcatgcgtggtagatgtttggagaaatgagaaactgttttctagatggaaatattgtttacgagctattaaactgtttattaatgatcacatgcttgataagataaaatctatactgcagaatagactagtatatgtggaaatgtcatagaaagttaatgagagcaaaaatatataaggttgtattccatatttgttattttttctgtaatagttaaaaaaatacattcgatggtctatctatcagattattatgtgttataaggtactttttctcataataaactagagtatgagtaagatagtgtttttcaaaacatataaatctaaaattgatggatgagatatacagctattaatttcgaaaatatataaatctaaaattgatggataagatatacagctattaatttcgaaaatatattttaatctgataactttaaacatggatttttgatggtggtttaacgttttaaaaaaagattttgttattgtagtatatgataatattaaaagatggatataaagaatttgctgactgcatgtactattttttacattactacattggctacggcagatatacctactccgccaccacacgctccggtaaacgggtcatgtgacaagggagaatatcttgataagaggcataatcaatgttgtaatcggtgtccacctggagaatttgccaaggttagatgtagtggtagtgataacacaaaatgtgaacgctgcccacctcatacatataccacaatcccaattattctaatggatgtcatcaatgtagaaaatgcccaacaggatcatttgataaggtaaagtgtaccggaacacagaacagtaaatgttcgtgtcttcctggttggtattgcgctactgattcttcacagactgaagattgttgaaattgtgtaccaaaaaggagatgtccatgcggatactttggtggaatagatgaacaaggaaatcctatttgtaaatcgtgctgtattggtgaatattgcaactacctacgtaattatagacttgatccattttctccatgcaaactatctaaatgtaattaattatgattttgatgataatgttaccatacattatatcgctacttggttagtgtattattcagtatgaagacctattaataattacttatcttttgacgatcttgttataattataatataaaaacttatggcatagtaacttataattgctaacacgataaattcgtaataatctgttttgttcaaaggaatctacaggcataaaaataaaaatataatttataatatactcttacagcgcgccatcatgaataacagcagtgaattgattgctgttattaatggatttagaaatagtggacgattttgtgatattagtatagttattaatgatgaaatgataaacgctcacagactcatcctatctggagcctccgaatatttttccattctgttttccaataattttatcgattctaatgaatacgaagttaatctaagtcatttagattatcaaagtgttaacgatttgatcgattacatttatgggatacctttgagcctaactaacgataacgtgaaatatattctttcaaccgctgattttttacaaattggatctgccattactgagtgcgaaaaatacatacttaaaaatctttgttctagaaactgtatcgatttctacatatacgctgataaatataataacaagaaaatagaatcagcgtcgtttaacacaatattacaaaatattttgaaactcatcaacgatgaaaactttaaatacttaacagaggaatcaatgataaaaattttaagcgatgatatgttaaatataaaaaatgaggatttcgccccactaattctcattaaatggttagagagtactcaacaatcatgcaccgtcgagttacttagatgcctcagaatatcattgctttccccacaagttataaaatcactttatagtcatcaactggttagttcaatctacgaatgtataacattcttaaacaatatagcattcttggatgaatcatttcctagataccatagcatcgagttgatatctatcggtataagtaattcgcatgataagatttccataaactgctacaatcataaaaaaaatacatgggaaatgatatcttcacgtagatataggtgtagtttcgcagtggccgtcctggataatattatttatatgatgggtggatatgatcagtccccgtatagaagttcaaaggttatagcgtacaatacatgtacaaattcttggatatatgatataccagagctaaaatatcctcgttctaattgtgggggactggctgatgacgaatacatttattgtataggcggcatacgcgatcaggattcatcgttgacatctagtattgataaatggaagccatcaaaaccatattggtagaagtatgctaaaatgcgcgaaccaaaatgtgatatgggggttgcgatgttaaacggattaatatatgtcatgggtggaatcgttaaaggtgacacgtgtaccgacgcactagagagtttatcagaagatggatggatgaagcatcaacgtcttccaataaaaatgtccaatatgtcgacgattgttcatgatggcaagatttatatatctggaggttacaacaatagtagtgtagttaatgtaatatcgaatctagtccttagctataatccgatatatgatgaatggaccaaattatcatcattaaacattcctagaattaatcccgctctatggtcagcgcataataaattatatgtaggaggaggaatatctgatgatgttcgaactaatacatctgaaacatacgataaagaaaaagattgttggacattggataatggtcacgtgttaccacgcaattatataatgtataaatgcgaaccgattaaacataaatatccattggaaaaaacacagtacacgaatgattttctaaagtatttggaaagttttataggtagttgatagaacaaaatacataattttgtaaaaataaatcactttttatactaatatgacacgattaccaatacttttgttactaatatcattagtatactctacaccttctcctcagacatctaaaaaataggtgatgatgcaactctatcatgtaatcgaaataatacaaatgactacgttgttatgagtgcttggtataaggagcccaattccattattcttttagctgctaaaagcgacgtcttgtattttgataattataccaaggataaaatatcttacgactctccatacgatgatctagttacaactatcacaattaaatcattgactgctagagatgccggtacttatgtatgtgcattctttatgacatcgcctacaaatgacactgataaagtagattatgaagaatactccacagagttgattgtaaatacagatagtgaatcgactatagacataatactatctggatctacacattcaccagaaactagttctgagaaaccagaggatatagataattttaattgctcgtcggtattcgaaatcgcgactccggaaccaattactgataatgtagaagatcatacagacaccgtcacatacactagtgatagcattaatacagtaagtgcaacatctggagaatccacaacagacgagactccggaaccaattactgataaagaagatcatacagttacagacactgtctcatacactacagtaagtacatcatctggaattgtcactactaaatcaaccaccgatgatgcggatctttatgatacgtacaatgatacagtaccatcaactactgtaggtagtagtacaacctctattagtaattataaaaccaaggactttgtagaaatatttggtattaccgcattaattatattgtcggccgtggcaatattctgtattacgtattatatatgtaataaacgttcacgtaaatacaaaacagagaacaaagtctagatttttgacttacataaatgtctgggatagtaaaatctatcatattgagcggaccatctggtttaggaaagacagccatagccaaaagactatgggaatatatttggatttgtggtgtcccataccactagatttcctcgtcctatggaacgagaaggtgtcgattaccattacgttaacagagaggccatctggaagggaatagccgccggaaactttctagaacatactgagtttttaggaaatatttacggaacttctaaaactgctgtgaatacagcggctattaataatcgtatttgtgtgatggatctaaacatcgatggcgttagaagtcttaaaaatacgtacctaatgccttactcggtgtatataagacctacctctcttaaaatggttgagaccaagcttcgtcgtagaaacactgaagcggatgatgagattcatcgtcgtgtgatgttggcaaaaactgacatggatgaggcaggtgaagccggtctattcgacactattatcattgaagatgatgtgaatttagcatatagtaagttaattcagatactacaggaccgtattagaatgtattttaacactaattaaagacttaagacttaaaacttgataattaataatataactcgtttttatatgtggctatttcaacgtctaatgtattagttaaatattaaaacttaccacgtaaaacttaaaatttaaaatgatatttcattgacagatagatcacacattatgaactttcaaggacttgtgttaactgacaattgcaaaaatcaatgggtcgttggaccattaataggaaaaggtggattcggtagtatttatactactaatgacaataattatgtagtaaaaatagagcccaaagctaacggatcattatttaccgaacaggcattttatactagagtacttaaaccatccgttatcgaagaatggaaaaaatctcacaatataaagcacgtaggtcttatcacgtgcaaggcatttggtctatacaaatccattaatgtggaatatagattcttggtaattaatagattaggtgcagatctagatgcggtgatcagagccaataataatagattaccaaaaaggtcggtgatgttgatcggaatcgaaatcttaaataccatacaatttatgcacgagcaaggatattctcacggagatattaaagcgagtaatatagtcttggatcaaatagataagaataaattatatctagtggattacggattggtttctaaattcatgtctaatggcgaacatgttccatttataagaaatccaaataaaatggataacggtactctagaatttacacctatagattcgcataaaggatacgttgtatctagacgtggagatctagaaacacttggatattgtatgattagatggttgggaggtatcttgccatggactaagatatctgaaacaaagaattgtgcattagtaagtgccacaaaacagaaatatgttaacaatactgcgactttgttaatgaccagtttgcaatatgcacctagagaattgctgcaatatattaccatggtaaactctttgacatattttgaggaacccaattacgacgagtttcggcacatattaatgcagggtgtatattattaagtgtggtgtttggttgatgtaaaatttttgttgataaaaattaaaaaaataacttaatttattattgatctcgtgtgtacaaccgaaatcatggcgatgttttacgcacacgctctcggtgggtacgacgagaatcttcatgcctttcctggaatatcatcgactgttgccaatgatgtcaggaaatattctgttgtgtcagtttataataacaagtatgacattgtaaaagacaaatatatgtggtgttacagtcaggtgaacaagagatatattggagcactgctgcctatgtttgagtgcaatgaatatctacaaattggagatccgatccatgatcaagaaggaaatcaaatttctatcatcacataccgccacaaaaactactatgctctaagcggaatcgggtacgagagtctagacttgtgtttggaaggagtagggattcatcatcacacacttgaagcaggaaacgctgtatatggaaaagttcaacatgattattctactatcaaagagaaggccaaagaaatgagtacacttagtccaggacctataattgattaccacgtctggataggagattgtatctgtcaagttactgctgtggacgtacatggaaaggaaattatgagaatgagattcaaaaagggtgcggtgcttccgatcccaaatctggtaaaagttaaacttggggagaatgatacagaaaatctttcttctactatatcggcggcaccatcgaggtaaccacctctctggaagacagcgtgaataatgtactcatgaaacgtttggaaactatacgccatatgtggtctgttgtatatgatcattttgatattgtgaatggtaaagaatgctgttatgtgcatacgcatttgtctaatcaaaatcttataccgagtactgtaaaaacaaatttgtacatgaagactatgggatcatgcattcaaatggattccatggaagctctagagtatcttagcgaactgaaggaatcaggtggatggagtcccagaccagaaatgcaggaatttgaatatccagatggagtggaagacactgaatcaattgagagattggtagaggagttcttcaatagatcagaacttcaggctggtaaattagtcaaatttggtaattctattaattgttaaacatacatctgtttcagctaagcaactaagaacacgtatacggcagcagcttccttttatactctcatcttttaccaacacaaagggtggatatttgttcattggagttgataataatacacacaaagtatttggattcacggtgggttacgactacctcagactgatagagaatgatatagaaaagcatatcaaaagactttgtgttgtgcatttctgtgagaagaaagaggacatcaagtacacgtgtcgattcatcaaggtatataaacctggggatgaggctacctcgacatacgtgtgcgctatcaaagtggaaagatgctgttgtgctgtgtttgcagattggccagaatcatggtatatggatactaatggtatcaataagtattctccagatgaatgggtgtcacatataaaattttaattaatgtaatagagaacaaataataaggttgtaatatcatatagacaataactaacaattaattagtaactgttatctcttttttaactaaccaactaactatatacctattaatacatcgtaattatagttcttaacatctattaatcattaattcgcttctttaattttttataaactaacattgttaattgaaaagggataacatgttacagaatataaattatatatggatttttttaaaaaggaaatacttgactggagtatatatttatctcttcattatatagcacgcgtgtgttccaatttttccacatcccatataatacaggattataatctcgttcgaacatacgagaaagtggataaaacaatagttgattttttatctaggttgccaaatttattccatattttagaatatggggaaaatattctacatatttattctatggatgatgctaatacgaatattataattttttttctagatagagtattaaatattaataagaacgggtcatttatacacaatctcgggttatcatcatccattaatataaaagaatatgtatatcaattagttaataatgatcatccagataataggataagactaatgcttgaaaatggacgtagaacaagacattttttgtcctatatatcagatacagttaatatctatatatgtattttaataaatcatggattttatatagatgccgaagacagttacggttgtacattattacatagatgtatatatcactataagaaatcagaatcagaatcatacaatgaattaattaagatattgttaaataatggatccgatgtagataaaaaagatacgtacggaaacacaccttttatcctattatgtaaacacgatatcaacaacgtggaattgtttgagatatgtttagagaatgctaatatagactctgtagactttaatagatatacacctcttcattatgtctcatgtcgtaataaatatgattttgtaaagttattaatttctaaaggagcaaatgttaatgcgcgtaataaattcggaactactccattttattgtggaattatacacggtatctcgcttataaaactatatttggaatcagacacagagttagaaatagataatgaacatatagttcgtcatttaataatttttgatgctgttgaatctttagattatctattatccagaggagttattgatattaactatcgtactatatacaacgaaacatctatttacgacgctgtcagttataatgcgtataatacgttggtctatctattaaacaaaaatggtgattttgagacgattactactagtggatgtacatgtatttcggaagcagtcgcaaacaacaacaaaataataatggaagtactattgtctaaacgaccatctttgaaaattatgatacagtctatgatagcaattactaaacataaacagcataatgcagatttattgaaaatgtgtataaaatatactgcgtgtatgaccgattatgatactcttatagatgtacagtcgctacagcaatataaatggtatattttaagatgtttcgatgaaatagatatcatgaagagatgttatataaaaaataaaactgtattccaattagttttttgtatcaaagacattaatactttaatgagatacggtaaacatccttctttcgtgaaatgcactagtctcgacgtatacggaagtcgtgtacgtaatatcatagcatctattagatatcgtcagagattaattagtctattatccaagaagctggatcctggagataaatggtcgtgttttcctaacgaaataaaatataaaatattggaaaactttaacgataacgaactgtccacatatctaaaaatcttataaacattattaaaatataaaatctaagtaggataaaatcacactacatcattgtttccttttagtgctcgacagtgtatactatttttaacactcataaataaaaatgaaaacgatttccgttgttacgttgttatgcgtactacctgctgttgtttattcaacatgtactgtacccactatgaataacgctaaattaacgtctaccgaaacatcgtttaatgataaacagaaagttacatttacatgtgatcagggatatcattctttggatccaaatgctgtctgtgaaacagataaatggaaatacgaaaatccatgcaagaaaatgtgcacagtttctgattatgtctctgaattatatgataagccattatacgaagtgaattccaccatgacactaagttgcaacggcgaaacaaaatattttcgttgcgaagaaaaaaatggaaatacttcttggaatgatactgttacgtgtcctaatgcggaatgtcaacctcttcaattagaacacggatcgtgtcaaccagttaaagaaaaatactcatttggggaatatataactatcaactgtgatgttggatatgaggttattggtgctttgtacataagttgtacagctaattcttggaatgttattccatcatgtcaacaaaaatgtgatatgccgtctctatctaacggattaatttccggatctacattttctatcggtggcgttatacatcttagttgtaaaagtggttttatactaacgggatctccatcatccacatgtatcgacggtaaatggaatcccatactcccaacatgtgtacgatctaacgaaaaatttgatccagtggatgatggtcccgacgatgagacagatttgagcaaactctcgaaagacgttgtacaatatgaacaagaaatagaatcgttagaagcaacttatcatataatcatagtggcgttaacaattatgggcgtcatatttttaatctccgttatagtattagtttgttcctgtgacaaaaataatgaccaatataagttccataaattgctaccgtaaatataaatccgttaaaataattaataattaataacgaacaagtatcaaaagattaaagaattatagctagaatcaattgagatgtcttcttcagtggatgttgatatctacgatgccgttagagcatttttactcaggcactattataacaagagatttattgtgtatggaagaagtaacgccatattacataatatatacaggctatttacaagatgcgccgttataccgttcgatgatatagtacgtactatgccaaatgaatcacgtgttaaacaatgggtgatggatacacttaatggtataatgatgaatgaacgcgatattactgtatgtgtgggcaccggaatactattcatggaaatgtttttcgattacaataaaaatagtatcaacaatcaactaatgtatgatataattaatagcgtatctataattctagctaatgagagatatagaagcgcttttaacgacgatggtatatacatccgtagaaatatgattaacaagttgtacggatacgcatctctaactactattggcacgatcgctggaggtgtttgttattatctgttgatgcatctagttagtttgtataaataattatttcaatatactagttaaaattttaagattttaaatgtataaaaaactaataacgtttttatttgtaataggtgcagtagcatcctattcgaataatgagtacactccgtttaataaactgagtgtaaaactctatatagatggagtagataatatagaaaattcatatactgatgataataatgaattggtgttaaattttaaagagtacacaatttctattattacagagtcatgcgacgtcggatttgattccatagatatagatgttataaacgactataaaattattgatatgtataccattgactcgtctactattcaacgcagaggtcacacgtgtagaatatctaccaaattatcatgccattatgataagtacccttatattcacaaatatgatggtgatgagcgacaatattctattactgcagagggaaaatgctataaaggaataaaatatgaaataagtatgatcaacgatgatactctattgagaaaacatactcttaaaattggatctacttatatatttgatcgtcatggacatagtaatacatattattcaaaatatgatttttaaaaatttaaaatatattatcacttcagtgacagtagtcaaataacaaacaacaccatgagatatattataattctcgcagttttgttcattaatagtatacatgctaaaataactagttataagtttgaatccgtcaattttgattccaaaattgaatggactggggatggtctatacaatatatcccttaaaaattatggcatcaagacgtggcaaacaatgtatacaaatgtaccagaaggaacatacgacatatccgcatttccaaagaatgatttcgtatctttctgggttaaatttgaacaaggcgattataaagtggaagagtattgtacgggactatgcgtcgaagtaaaaattggaccaccgactgtaacattaactgaatacgacgaccatatcaatttgtacatcgagcatccgtatgctactagaggtagcaaaaagattcctatttacaaacgcggtgacatgtgtgatatctacttgttgtatacggctaacttcacattcggagattctaaagaaccagtaccatatgatatcgatgactacgattgcacgtctacaggttgcagcatagactttgtcacaacagaaaaagtgtgcgtgacagcacagggagccacagaagggtttctcgaaaaaattactccatggagttcggaagtatgtctgacacctaaaaagagtgtatatacatgcgcaattagatccaaagaagatgttcccaatttcaaggacaaaatggccagagttatcaagagaaaatttaataaacagtctcaatcttatttaactaaatttctcggtagcacatcaaatgatgttaccacttttcttagcatgcttaacttgactaaatattcataactaatttttattaatgatacaaaaacgaaataaaactgcatattatacactggttaacgcccttataggctctaaccattttcaagatgaggtccctgattatagtccttctgttcccctctatcatctactccatgtctattagacgatgtgagaagactgaagaggaaacatggggattgaaaatagggttgtgtataattgccaaagatttttatcccgaaagaactgattgcagtgttcatctcccaactgcaagtgaaggattgataactgaaggcaatggattcagggatatacgaaacaccgataaattataaaaaaagcaatgtgtccgctgtttccgttaataatactattttcgtaactggcggattattcataaataactctaatagcacgatcgtggttaacaatatggaaaaacttgacatttataaagacaaacaatggtcgattatagaaatgcctatggctagggtatatcacggcatcgactcgacatttggaatgttatattttgccggaggtctatccgttaccgaacaatatggtaatttagagaaaaacaacgagatatcttgttacaatcctagaacgaataagtggtttgatatttcatatactatttataagatatccatatcatcattgtgtaaactaaataacgtcttctatgtatttagtaaggacattggatatgtggaaaagtatgatggtgcatggaagttagtacatgatcgtctccccgctataaaggcattatcaacttctccttattgattgaaaatgaaaatataaatagtttttatgtatagcagtattaccctatagttttattgcttactactaacatggatacagatgttacaaatgtagaagatatcataaatgaaatagatagagagaaagaagaaatactaaaaaatgtagaaattgaaaataataaaaacattaacaagaatcatcccaatgaatatattagagaagcactcgttattaataccagtagtaatagtgattccattgataaagaagttatagaatgtatctgtcacgatgtaggaatatagatcatatctactaatttttataatcaatacaaaacataaaaaacaactcgttattacatagcaggcatggaatccttcaagtattgttttgataacgatggcaagaaatggattatcggaaatactttatattctggtaattcaatactatataaggtcagaaaaaatttcactagttcgttctacaattacgtaatgaagatagatcacaaatcacacaagccattgttgtctgaaatacgattctatatatctgtattggatcctttgactatcgacaactggacacgggaacgtggtataaagtatttggctattccagatctgtatggaattggagaaaccgatgattatatgttcttcgttataaagaatttgggaagagtattcgccccaaaggatactgaatcagtcttcgaagcatgcgtcactatgataaacacgttagagtttatacactctcgaggatttacccatggaaaaatagaaccgaggaatatactgattagaaataaacgtctttcactaattgactattctagaactaacaaactatacaagagtggaaactcacatatagattacaacgaggacatgataacttcaggaaatatcaattatatgtgtgtagacaatcatcttggagcaacagtttcaaaacgaggagatttagaaatgttgggatattgcatgatagaatggttcggtggcaaacttccatggaaaaacgaaagtagtataaaagtaataaaacaaaaaaaagaatataaaaaatttatagctactttctttgaggactgttttcctgaaggaaatgaacctctggaattagttagatatatagaattagtatacacgttagattattctcaaactcctaattatgacagactacgtaaactgtttatacaagattgaaattatattctttttttatagagtgtggtagtgttacggatatctaatattaatattagactatctctatcgcgctacacgaccaatatcgattactatggatatcttcagggaaatcgcatcttctatgaaaggagagaatgtattcatttctccagcgtcaatctcgtcagtattgacaatactgtattatggagctaatggatccactgctgaacagctatcaaaatatgtagaaacggaggagaacacggataaggttagcgctcaaaatatctcattcaaatccatgaataaagtatatgggcgatattctgccgtgtttaaagattcctttttgagaaaaattggcgataagtttcaaactgttgacttcactgattgtcgcactatagatgcaatcaacaagtgtgtagatatctttactgaggggaaaatcaatccactattggatgaaccattgtctcctagcaattagtgccgtatactttaaagcaaaatggttgacgccattcgaaaaggaatttaccagtgattatcccttttacgtatctccgacggaaatggtagatgtaagtatgatgtctatgtacggcaaggcatttaatcacgcatctgtaaaggaatcattcggcaacttttcaatcatagaactgccatatgttggagatactagtatgatggtcattcttccagacaagattgatggattagaatccatagaacaaaatctaacagatacaaattttaagaaatggtgtaactctctggaagctacgtttatcgatgttcacattcccaagtttaaggtaacaggctcgtataatctggtggatactctagtaaagtcaggactgacagaggtgttcggttcaactggagattatagcaatatgtgtaattcagatgtgagtgtcgacgctatgatccacaaaacgtatatagatgtcaatgaagagtatacagaagcagctgcagcaacttgtgcactggtgtcagactgtgcatcaacaattacaaatgagttctgtgtagatcatccgttcatctatgtgattaggcatgttgatggaaaaattcttttcgttggtagatattgctctccgacaactaattgttaaccattttttttaaaaaatagaaaaaacatgtggtattagtgcaggtcgttattcttccaattgcaattggtaagatgacggccaactttagtacccacgtcttttcaccacagcactgtggatgtgacagactgaccagtattgatgacgtcagacaatgtttgactgaatatatttattggtcgtcctatgcataccgcaacaggcaatgcgctggacaattgtattccacactcctctcttttagagatgatgcggaattagtgttcatcgacattcgcgagctggtaaaaaatatgccgtgggatgatgtcaaagattgtgcagaaatcatccgttgttatataccggatgagcaaaaaaccatcagagagatttcggccatcatcggactttgtgcatatgctgctacttactggggaggtgaagaccatcccactagtaacagtctgaacgcattgtttgtgatgcttgagatgctaaattacgtggattataacatcatattccggcgtatgaattgatgagttgtacatcttgacattttcttctttcttctcttctccctttcccagaaacaaacttttttacccactataaaataaaatgagtatactacctgttatatttctttctatatttttttattcttcattcgttcagacttttaacgcgtctgaatgtatcgacaaagggcaatattttgcatcattcatggagttagaaaacgagccagtaatcttaccatgtcctcaaataaatacgctatcatccggatataatatattagatattttatgggaaaaacgaggagcggataatgatagaattataccgatagataatggtagcaatatgctaattctgaacccgacacaatcagactctggtatttatatatgcattaccacgaacgaaacctactgtgacatgatgtcgttaaatttgacaatcgtgtctgtctcagaatcaaatatagattttatctcgtatccacaaatagtaaatgagagatctactggcgaaatggtatgtcccaatattaatgcatttattgctagtaacgtaaacgcagatattatatggagcgggcatcgacgccttagaaataagagacttaaacaacggacacctggaattattaccatagaagatgttagaaaaaatgatgctggttattatacatgtgttttagaatatatatacggtggcaaaacatataacgtaaccagaattgtaaaattagaggtacgggatagaataatacatcctactatgcaattaccagatggcattgtaacttcaataggtagtaatttgactattgcatgcagagtatcgttgagacctcccacaacggatgcagacgtcttttggataagtaatggtatgtattacgaagaagatgatggggacggaaacggtagaataagtgtagcaaataaaatctatatgaccgataagagacgtgttattacatcccggttaaacattaatcctgtcaaggaagaagatgctacaacgtttacgtgtatggcgtttactattcctagcatcagtaaaacagttactgttagtataacgtgaatgtatgttgttacatttccatgtcaattgagtttataagaatttttatacattatcttccaacaagcaattgacgaacgtattgctatgattaactcccacgatactatgcatattattaatcattaacttgcagactatacctagagctattttgacatactcgtgttcttgtgtaattgcagtatctatattattaaagtacgtaaatctagctatagttttattatttaattttagataatataccgtctccttatttttaaaaattgccacatcctttattaaatcatgaatgggaatttctatgtcatagttaatatattgtgaacaacaagagcagatatctataggaaagggtggaatgcgatacattgatctatgtagttttaaaacacacgcaaactttgaagaatttatataaatcattccatcgatacatccttctatgttgagatgtatatatccaggaattcgtttattaatatcgggaaatgtataaactaaaacattgcccggaagcggagcttctaccggagttatatcagtttttaacttacaaaatgtaaccaatacctttgcatgacttgttttgttcggcaacgttagtttaaacttgacgaatggattaattacaatagcatgatccgcgcatctattaagtttttttactttaacgcccttgtatgtttttacagagactttatctaaatttctagtgcttgtatgtgttataaatataacgggatatagaactgaatcacctaccttagatacccaattacattttatcagatccagataataaacaaattttgtcgccctaactaattctatattgttatatattttacaattggttatgatatcatgtaataacttggagtctaacgcgcatcgtcgtacgtttatacaattgtgatttagtgtagtatatctacacatgtatttttccgcactatagtattctggactagtgataaaactatcgttatatctgtcttcaatgaactcatcgagatattgctctctgtcatattcatacacctgcataaactttctagacatcttacaatccgtgttattttaggatcatatttacatatttacgggtatatcaaagatgttagattagttaatgggaatcgtctataataatgaatattaaacaattatatgaggacttttaccacaaagcatcataaaaatgagtcgtcgtctgatttatgttttaaatatcaaccgcgaatcaactcataaaatacaagagaatgaaatatatacatattttagtcattgcaatatagaccatacttctacagaacttgattttgtagttaaaaactatgatctaaacagacgacaacctgtaactgggtatactgcactacactgctatttgtataataattactttacaaacgatgtactgaagatattattaaatcatggagtggatgtaacgatgaaaaccagtagcggacgtatgcctgtttatatattgcttactagatgttgcaatatttcacatgatgtagtgatagatatgatagacaaagataaaaaccacttattacatagagactattccaacctattactagagtatataaaatctcgttacatgttattaaaggaagaggatatcgatgagaacatagtatccactttattagataagggaatcgatcctaactttaaacaagacggatatacagcgttacattattattatttgtgtctcgcacacgtttataaaccaggtgagtgtagaaaaccgataacgataaaaaaggccaagcgaattatttctttgtttatacaacatggagctaatctaaacgcgttagataattgtggtaatacaccattccatttgtatcttagtattgaaatgtgtaataatattcatatgactaaaatgctgttgacttttaatccgaatttcgaaatatgtaataatcatggattaacgcctatactatgttatataacttccgactacatacaacacgatattcttgttatgttaatacatcactatgaaacaaatgttggagaaatgccgatagatgagcgtcgtatgatcgtattcgagtttatcaaaacatattctacacgtcctgcagattcgataacttatttgatgaataggtttaaaaatatagatatttatacccgctatgaaggaaagacattattacacgtagcatgtgaatataataatacacacgtaatagattatcttatacgtatcaacggagatataaatgcgttaaccgacaataacaaacacgctacacaactcattatagataacaaagaaaattccccatataccattaattgtttactgtatatacttagatatattgtagataagaatgtgataagatcgttggtggatcaacttccatctctacctatcttcgatataaaatcatttgagaaattcatatcctactgtatacttttagatgacacattttacaatagacacgttaggaatcgcgattctaaaacgtatcgatacgcattttcaaaatacatgtcgtttgataaatacgatggtataataactaaatgtcataaagaaacaatattgctcaaactatccactgttctagacactacactatatgcagttttaagatgccataattcgaaaaagttaagaagatacctcaccgagttaaaaaaatataataacgataagtcctttaaaatatattctaatattatgaatgagagataccttaatgtatattataaagatatgtacgtgtcaaaggtatatgataaactatttcctgttttcacagataaaaattgtctactaacattactaccttcagaaattatatacgaaatattatacatgctgacaattaacgatctttataatatatcgtatccacctaccaaagtatagttgtatttttctcatgcgatgtgtgtaaaaaaactgatattatataaatattttagtgccgtataataaagatgacgatgaaaatgatggtacatatatatttcgtatcattatcattattgttattgctattccacagttacgccatagacatcgaaaatgaaatcacagaattcttcaataaaatgagagatactctaccagctaaagactctaaatggttgaatccagcatgtatgttcggaggcacaatgaatgatatagccgctctaggagagccattcagcgcaaagtgtcctcctattgaagacagtcttttatcgcacagatataaagactatgtggttaaatgggaaaggctagaaaaaaatagacggcgacaggtttctaataaacgtgttaaacatggtgatttatggatagccaactatacatctaaattcagtaaccgtaggtatttgtgcaccgtaactacaaagaatggtgactgtgttcagggtatagttagatctcatattagaaaacctccttcatgcattccaaaaacatatgaactaggtactcatgataagtatggcatagacttatactgtggaattctttacgcaaaacattataataatataacttggtataaagataataaggaaattaatatcgacgacattaagtattcacaaacgggaaaggaattaattattcataatccagagttagaagatagcggaagatacgactgttacgttcattacgacgacgttagaatcaagaatgatatcgtagtatcaagatgtaaaatacttacggttataccgtcacaagaccacaggtttaaactaatactagatccaaaaatcaacgtaacgataggagaacctgccaatataacatgcactgctgtgtcaacgtcattattgattgacgatgtactgattgaatgggaaaatccatccggatggcttataggattcgattttgatgtatactctgttttaactagtagaggcggtattaccgaggcgaccttgtactttgaaaatgttactgaagaatatataggtaatacatataaatgtcgtggacacaactattattttgaaaaaacccttacaactacagtagtattggagtaaatatacaatgcatttttatatacattactgaataattattattattatttatatcgtatttgtgctataacgcgactatctaggtatttgtatctcactgatagagaacatataaatatagactctattaaacagttgtgtaaaatatcaaatcctaatagatgtggatgtacggctttacatgagtacttttataattatagatcagtcaacggaaaatacaagtatagatacaacggttactatcaatattattcatctagcgattatgaaaattataatgaatattattatgatgattatgatagaactggtatgaacagcgagagcgatagtgagagtgataatatatcaatcaaaacagaatatgagaatgaatatgaattctatgatgaaacacaagatcaaagtacacaactagtaggttacgacattaaactcaaaaccaatgaggatgattttatggctatgatagatcagtgggtgtccatgattatatagatgaatcaattaataaagtagtatatggaagagagtctcacgtaagatggcgggatatatggcaagaacataatgatggcgtatacagtataggaaaggagtgcatagataatatatacgaagacaaccataccgtagacgaattctacaagatagacagcgtatcagatgtagatgacgcggaacacatatctccgataactaatgatgtatctacacaaacatgggaaaagaaatcagagttagatagatacatggaaatgtatcctcgtcatagatatagtaagcattctgtctttaagggattttctgacaaagttagaaaaaatgatttagacatgaatgtggtaaaagaattactttctaacggtgcatctctaacaattaaggatagcagtaataaggatccaataaccgtttattttcgaagaacgataatgaatttagaaatgattgatgaacgaaagtatatagtacactcctatctaaaaaattataaaaatttcgattatccatttttcaggaagttagttttgactaataaacattgtctcaacaattattataatataagcgacagcaaatatggaacaccgctacatatattggcgtctaataaaaaattaataactcctaattacatgaagttattagtgtataacggaaatgatataaacgcacgaggtgaagatacacaaatgcgaactccattacacaaatatttgtgtaaatttgtatatcataatattgaatatggtatccgatactataatgaaaagattatagacgcatttatagagttaggagccgatctaactattccaaatgacgatggaatgataccagtagtttactgtatacactcaaatgccgaatatggttataacaatattactaacataaagataatacgtaaactacttaatcttagtagacgtgcgtcacataatctatttagagatcgagtcatgcacgattatataagtaatacatatattgatcttgagtgtttagatattattagatcgttggatggattcgatatcaatggttactttgaaggacgtacaccacttcattgcgctatacaacataacttcactcagattgctaagtacttattagatcgaggagctgatatagtcgtacccaacacattgattatacatcagtacatacagtaaatagcatagatatggaggaggatacaaatatttcaaataaagttatgagatacgacactgtcaataatatatgggaaacattacctaacttctggactggaactataaatccaggcgtggtctcgcataaagatgatatatatgttgtatgcgacatcaaagatgaaaaaaatgttaaaacttgtatatttagatataacacgaatacgtataacggatgggaattggtcacgacgacagaaagcagattatcagctctgcatactattctttataacaataccataatgatgttacattgttatgaatcgtatatgttacaagatacatttaatgtgtacactcgcgaatggaatcatatgtgtcatcaacattcgaatagttatatcatgtacaatatactacccatctactaaatataatagaataaaataaatgagtatgatcattttagataacgattgattttatcattaccgcttcattcttatattctttgcttacggaacctatatttagaaacatctactaacgattttttatgcttgcattattaatggtatgtaatatgattgattgtgtacgcaataccaatttgttaagtatgaatacggggtacaaacataaactgaagtttaacattatttatttatgatatatatcgttattgtttggtctataccatggatatctttaaagaactaatcttaaaacacacggatgaaaatgttttgatttctccagtttctattttatctactttatctattctaaatcatggagcagctggttctacagctgaacaactatcaaaatatatagagaatatgaatgagaatacacccgatgacaataatgacatggacgtagatattccgtattgtgcgacactagctaccgcaaataaaatatacggtagcgatagtatcgagttccacgcctccttcctacaaaaaataaaagacgattttcaaactgtaaactttaataatgctaaccaaacaaaggaactaatcaacgaatgggttaagacaatgacaaatggtaaaattaattccttattgactagtccgctatccattaatactcgtatgacagttgttagcgccgtccattttaaagcaatgtggaaatatccattttctaaacatcttacatatacagacaagttttatatttctaagaatatagttaccagcgttgatatgatggtgggtaccgagaataacttgcaatatgtacatattaatgaattattcggaggattctctattatcgatattccatacgagggaaactctagtatggtgattatactaccggacgacatagaaggtatatataacatagaaaaaaatataacagatgaaaaatttaaaaaatggtgtggtatgttatctactaaaagtatagacttgtatatgccaaagtttaaagtggaaatgacagaaccgtataatctggtaccgattttagaaaatttaggacttactaatatattcggatattatgcagattttagcaagatgtgtaatgaaactatcactgtagaaaaatttctacatacgacgtttatagatgttaatgaggagtatacagaagcatcggccgttacaggagtatttatgactaacttttcgatggtatatcgtacgaaggtctacataaaccatccattcatgtacatgattaaagacaccacaggacgtatactttttatagggaaatactgctatccgcaataaatataaacaaatagacttttatcacgtttatctatgtctaaatattacaaatagtaatagtataaactaaagctgataatacttaaaaaaataataatatcatttacaattaatagtataaactaaaaattaaacaaatcgttattataagtaatatcaaaatgatgatatacggattaatagcgtgtcttatattcgtgacttcatccatcgctagtccactttatattcccgttattccacccattacggaagataaatcgttcaatagtgtagaggtattagtttccttgtttagagatgaccaaaaagactatacggtaacttctcagttcaataactacactatcgataccaaagactggactatcggcgtactatccacacctgatggtttggatataccattgactaatataacttattggtcacggtttactataggtcgtgcattgttcaaatcagagtctgaggatattttccaaaagaaaatgagtattctaggtgtttctatagaatgtaagaagtcgtcgacattacttacttttttgaccgtgcgtaaaatgactcgagtatttaataaatttccagatatggcttattatcgaggagactgtttaaaagccgtttatgtaacaatgacttataaaaatactaaaactggagagactgattacacgtacctctctaatggggggttgcctgcatactatcgtaatggggtcgatggttgattattgattagtatattccttattcacacaaaaagaacatttttataaacatgaaaccactgtctaaatgtaattatgatcttgatttatagatgaagatcagcctttagaggattttaaccagtatgtttaatatgaaaaaaataaacataacatattttgagattaagcgctattgtgcttaattattttgctctataaactgaatatatagccacaattattgacgggcttgtttatgaccggcaatcatgaatttacagaaattatctctggctatatatcttactgcgacatgttcgtggtgttatgaaacatgcataagaaaaactgcgttgtatcatgacattcaattggagcatgtagaagacaataaagatagtgtagcgtcgctaccgtacaagtagtcaatcaaagagaacgtagtagattgttggctacatttaattggacagatatagctgagggtgttagaaatgagttcattaaaatatgtgatatcaacggaacatatttatataattatactattgctgttagtataattattgattccacggaagaactaccaacagttactccaattacaacaacatatgaaccttctacatataattatactatcgatgatagcactgttattactactgaagaactacaagtgactcctcatatggatctccatcgatgatacatgtattaaaatactttccgaataagtcttttaaatattgtattaattatgaaaaactatgctatgcgagtatgatgcaaagatgtttaatgatacgatactagattttatctctagcgagagatgtcgttagaatcatttatcataactacgtttaataataattcatcaacgaatatcgataacatgtgtcatttatacgttaaagtctgtccgtcttctctattgtttagactgtttgtagaatgctgtgatataaacaaactagtagaaggtacgactccgttacactgttatctaatgaatgaaggatttgaatcatctgttttaaaaaacctattaaaggagtatgtcatgaatacgtttaatgttcatgacatccattacacaaatatttaactcatgatgaagttgagaatgatatgctttctgatagtatagatagctttagctaatataaaaatatattaatccactatatattctagacttgatttaaaaccgataaactactacgtactgtataagttgttaagaaaaggagcagaccctaattatgcagatgatagaggtaatacttttcttcattacttctgcatctatatgtccacttatgagaaaacgtcatttaataagatgcatcgtgaaaagaaatttattaaagagttggtaaaatatgaaaccgaaagtaaataatataggaaatacacctctacataactacgtatctcaatatgatatcactctcattcctcatccacaacccattaaaaaaatggaaattaaagccctctattagcataaacggctacaggtctacctttacaatggcctttccttgtgcccagttcagaccctgtcattgccacgctactaaggactccctgaataccgtggccgacgtcagacattgtctgactgaatacatcctgtgggtttctcatagatggacccatagagaaactgcagggcctctctacaggcttctcatctctttcagaactgatgcaacggagctctttggtggtgagttgaaggattcacttccgtgggacaatatcgacaattgcgtggagatcattaaatgtttcatcagaaatgactccatgaaaaccgccgaagaacttcgtgcaatcattggactttgtactcaatcagctatcgtctctggaagagtcttcaacgataagtatatcgacatactacttatgctgcgaaagattctgaacgagaacgactatctcaccctcttggatcatatccgcactgctaaatactaaatctccttcatgctctctcactacactttttatcatcttatgaggaatgattgccttcatcatttttcgtgaaataggaataattagcaccagaatagctatggattgcacatgtattctatgtcgtctactggatgaagatgtgacgtacaaaaaaataaaactagaaattgaaacgtgtcacaacttatcaaaacatatagatagacgaagaaacaatgcgctacattgttacgtctccaataaatgcgatacagacattaagattgttcgactgttactctctcgcggagtcgagagacttcgtagaaacaacgaaggattaactccgctaggagtatacagtaagcatagatacgtcaaatctcaaattgtgcatctactgatatccagctattcgaattcctctaacgaactcaagtcgaatataaatgatttcgatctgtattcggataatatcgacttacgtctgctaaaatacctaattgtggataaacggatacgtccgtccaagaatacgaattatgcaatcaatagtctcggattggtggatatatacgtaacgacgcctaatccgagaccagaagtattgctatggcttcttaaatcagaatgttacagcaccggttacgtatttcgtacctgtatgtacaacagtgatatgtgtaagaactctcttcattactatatatcgtctcatagagaatctcaatctctatccaaggatgtaattaaatgtttgatcaataacaatgtttccatccatggcagagacgaaggaggatctttacccatccaatactactggtctttctcaaccatagatatagagattgttaaattattattaataaaggatgtggacacgtgtagagtatacgacgtcagccctatattagaggcgtattatctaaacaagcgatttagagtaaccccatataatgtagacatggaaatcgttaatcttcttattgagagacgtcatactcttgtcgacgtaatgcgtagtattacttcgtacgattccagagaatataaccactacatcatcgataacattctaaagagatttagacaacaggatgaatccatcgtacaagccatgttgataaactacttacattacggcgatatggtcgttcgatgcatgttagataacggacaacaactatcctctgcacgactactttgttaataataatctcgtcgatgtaaacgtcgtaaggtttatcgtggaaaatatggacacgcggctgtaaatcacatatctaacaatggccgtctatgtatgtacggtctgatattatcgagatttaataattgcgggtatcactgttatgaaaccatactaatagatgtatttgatatactaagcaagtacatggataatatagatatgatcgataatgagaataaaactctactatattacgcggtcgatgtcaataatatacaatttgcaaagcggttattggaatatggagcgagtgttacaacatcacgctcgataatcaatacggccatccagaaaagtagttacagaagagaaaacaaaacgaagctagttgatttattacttagctaccatcccactctagagactatgattgacgcatttaatagagatatacgctatctatatcctgaaccattatcggcatgtatcagatacgccttaatcatagatgatgattttccttctaaagtaagtatgatatcgccggtcatcataaggaactaaagcgctatagagtagacattaatagaatgaagaatgcctacatatcaggcgtctccatgtttgatatattatttaaacgaagcaaacgccacagattgagatacgcaaagaatccgacatcaaatggtacaaaaaagaactaacgtccatcattacagatactgtaaagaacagtgagaggatcgactccatagtggacaacattaatacagacgataacttgatttcgaaattacccatggagatactttattactccattaaataatttatcatggagcgataatgtcctgtttcatttgtttccatgacatattacaaaatcgattccgtccaagatgataaaaacatttaccggcatcataaacacggagtttattttatatgtctcgcataaacattactaaaaaaatatattgttcggttttctttcacatctttaattatgaaaaagtaaatcattatgagatggacgagattgtgagcatcgttcgcgacagtatgtggtacatacctaacgtatttatggacgacggtaagaatgaaggtcacgtttctgtcaacaatgtctgtcatatgtatttcacgttctttgatgtggatacatcgtctcatctgtttaagctagttattaaacactgcgatctgaataaacgaggtaactctccattacattgctatacgatgaatacacgatttaatccatctgtattaaagatattgttacaccacggcatgcgtaactttgatagcaaggatgaccactatcaatcgataacaagatctttgatatactaacggacaccattgatgactttagtaaatcatccgatctattgctgtgttatcttagatataaattcaatgggagcttaaactattacgttctgtacaaaggatccgaccctaattgcgccgacgaggatgaactcacttctcttcattactactgtaaacacatatccacgttctacaaaagcaattattacaagtcaagtcacactaagatgcgagccgagaagcgattcatctacgcgataatagattatggagcaaacattaacgcggttacacacttaccttcaacagtataccaaacatagtcctcgtgtggtgtatgctcttttatctcgaggatacgtaataatcttgattgtacacccatcatggaacgattgtgcaacaggtcatattctcataatgttactcaattggcacgaacaaaaggaagaaggacaacatctactttatctattcataaaacataatcaaggatacactctcaatatactacggtatctactagataggttcgacattcagaaagacgaatactataataccgcctttcaaaattgtaacaacaatgttgcctcatacatcggatacgacatcaaccttccgactaaagacggtattcgacttggtgtttgaaaacagaaacatcatatacaaggcggatgttgtgaatgacatcatccaccacagactgaaagtacctatgattaaatcgttgttctacaagatgtcagaattctctccctacgacgattactacgtaaaaaagatactagcctactgcctattaagggacgagtcattcgcggaactacatagtaaattctgtttaaacgaggactataaaagtgtatttatgaaaaatatatcattcgataagatagattccatcatcgtgacataagtcgccttaaagagattcgaatctccgacaccgacctgtatacggtatcacagctatcttaaagccatacattcagacagtcacatttcatttcccatgtacgacgatctcatagaacagtgccatctatcgatggagcgtaaaagtaaactcgtcgacaaagcactcaataaattagagtctaccatcgatggccaatctagactatcgtatttgcctccggaaattatgcgcaatatcatctaaacagtatgttgtacggaaagaaccattacaaatattatccatgatagaaagaaaatatctatatgattggagaagtaggaaacaggaacaagacgacgattactacattattaaatcatgaagtccgtattatactcgtatatattgtttctctcatgtataataataaacggaagagatatagcaccgcatgcaccatccgatggaaagtgtaaagacaacgaatacaaacgccataatttgtgtccgggaacatacgcttccagattatgcgaacacacaatgtacgccgtgtggttcgggtaccttcacatctcgcaataatcatttacccgcttgtctaagttgtaacggaagatgcgatcgtgtaacactactcacaatagaatctgtgaatgctctcccggatattattgtcttctcaaaggatcatccggatgcaaggcatgtgtttcccaaacaaaatgtggaataggatacggagtatccggagacgtcatctgttctccgtgtggtctcggaacatattctcacaccgtctcttccgcagataaatgcgaacccgtacccagaaatacctttaactatatcgatgtggaaattaatctgtatcccgtcaacgacacgtcgtgtactcggacgaccactaccggtctcagtgaatccatctcaacgtcggaactaactattactatgaatcataaagactgtaatcccgtatttcgtgatggatacttctctgtccttaataaggtagcaacttcaggtttctttacaggagaaaggtgtgcactctgaatttcgagattaaatgcaataacaaagattcttcctccaaacagttaacgaaagcaaagaatgatactatcatgccgcattcggagacagtaactctagcgtcgacatctatatactatatagtaataccaatactcaagactacgaaactgatacaatctcttatcatgtgggtaatgtagccatatgcccggtagttgcgatatacataaactgatcactaattccaaacccacccgctttttatagtaagtttttcacccataaatacaataattaatttctcgtaaaagtagaaaatatattctaatttattgcacggtaaggaagtagaatcataaagaacagtactcaatcaatagcaatcatgaaacaatatatcgtactggcatgcatgtgcctgccagtcttcagcaatcatcctcatcgtgtacggaagaagaaaacaaacatcatatgggaatcgatgttattatcaaagtcacaaagcaagaccaaacaccgaccgatgataagatttgccaatccgtaacggaaattacagagtccgagtcagatccagatcccgaggtggaatcagtcgaggatgtagatcctcctaccacttattactccatcatcggtggaggtctgagaatgaactttggattcaccaaatgtcctcagattaaatccatctcagaatccgctgatggaaagactgtgaggtgtctatcgacatcagatgtagcgaagaagagaaagacagcgacatcaagacccatccagtactcgggtctaacatctctcataagaaagtgagttacgaagatatcatcggttcaacgatcgtcgatacaaaatgcgtcaagaatctagagtttagcgttcgtatcggagacatgtgcaaggaatcatctgaacttgaggtcaaggatggattcaagtatgtcgacggatcggcatctgaaggtgcaaccgatgatacttcactcatcgattcaacaaaactcaaagcgtgtgtctgaatcgataactctattcatctgaaattggatgagtagggttaatcgaacgattcaggcacaccacgaattaaaaaagtgtaccggacactatattccggtttgcaaaacaaaaatgttcttaactacattcacaaaaagttacctctcgcgacttcttctttttctgtctcaatagtgtgatacgattatgacactattcctattcctattcctatttcctttcagggtatcacaaaaatattaaacctctttctgatggtctcataaaaaaagttttacaaaaatatttttattctctttctctctttgatggtctcataaaaaaagttttacaaaaatatttttattctctttctctctttgatggtctcataaaaaa

SEQ ID NO: 10 - DNA, 184661 bp, synthetic construct
  source 1..184661: mol_type = other DNA
agataaaatagaaactggagaaatcaaaacattttcatccgtgtgttttaagattagttctttaaagatatccatggtatagaccaaacaataacgataacgatatatatcataaataaataatgttaaatttcagtttatgtttgtaccccgtattcatacttaacaaattggtattacataccattaataatgcaagcataaaaaatcgttagtagatgtttctaaatataggttccgtaagcaaagaatataagaatgaagggtaatgataaaatcaatcgttatctaaaatgatcatactcatttattttattctattatattaacacatacatttttaacagcaacacattcaatattgtattgttatttttatattatttacacaattaacaatatattattagtttatattactgaattaataatataaaattcccaatcttgttataaacacacactgagaaacagcataaacacagaatccatcaaaaatgttgataaattatctgatgttgttgttcgctgctatgataatcagatcattcgccgatagtggtaacgctatcgaaacgacattgccagaaattacaaacgctacaacagatattccagctatcagattatgcggtccagagggagatggatattgtttacacggtgactgtatccacgctagagatatcgacggtatgtattgtagatgctctcatggttatacaggcattagatgtcagcatgtagtattagtagactatcaacgttcagaaaaaccaaacactacaacgtcatatatcccatctcccggtattgtgcttgtattagtaggcattattatgtgttgtctattatctgtttataggttcactcgacgaactaaactacctatacaagatatggttgtgccataatttttataaattttttttatgagtatttttacaaaaatgtataaagtgtatgtcttatgtatatttataaaaatgctaaatatgcgatgtatctatgttatttgtatttatctaaacaatacctctacctctagatattatacaaaaattttttatttcagcatattaaagtaaaatctagttaccttgaaaatgaatacagtgggtggttccgtatcaccagtaagaacataatagtcgaatacagtatccgattgagattttgcatacaatactagtctagaaagaaatttgtaatcatcttctgtgacgggagtccatatatctgtatcatcgtctagtttatcagtgtcccatgctatatttctgttatcatcattagttaatgaaaataactctcgtgcttcagaaaagtcaaatattgtatccatacatacatctccaaaactatcgcttatacgtttatctttaacgatacctatacctagatggttatttactaacagacattttccagatctattgactataactcctatagtttccacatcaaccaagtaatgatcatctattgttatataacaataacataactcttttccgtttttatcagtatgtatatctatattaacgtcgtcgttgtagtgaatagtagttattgatctattatatgaaacggatatgtctagaacagcaattgtcttacgtccagttaacactttcgttgatttaaagtctagagtctttgcaaacataatatccttatccgactttatatttcctgtagggtggtataattttattttgcctccacatatcggtgtttccaaatatattactagacaatattccatatagttattagttaagggtacccaattagaacacgtacgcttattatcatcatttggatcgtatttcataaaagttattgtactatcgatgtcaacacattctacattttttaatcgtctatatagtatttttctgatattttctataatatcagaattgtcttccatcggaagttgtatactatcggaatcagttacatgtttaaataattctctgatgtcattccttatacaatcaaattcattattaaacagtttaatagtctgtagacctttatcgtcgtaaatatccattgtcttattagttacgcttatttttatgtgttttacgttgctttattatattttataagaatgattgtttgacgaatcacgagaactattaagacacattattaggtatatattataaaaaagtttttgattacgatgttataagaggaaagaggacacattaacatcatacatcaattaactacattcttataacatcgtaatcaaaagaattgcaattttgatgtataacaactgtcaatgggttatggaattgtatattacatattatacggtatgttggtaacgacaaataccgatcggtaattgtctgccggtgtaatagaattatatatatctatctattacaccggccttgtatacataataataagttgtggtagtatgatctccatatttataatttaggactttgtattcagtatttttggaatcataaaaaataaaaaaaagttttactaatttaaaatttaaaaagtatttacatttttttcactgtttagtcgcggatatggaattcgatcctgccaaaatcaatacatcatctatagatcatgtaacaatattacaatacatagatgaaccaaatgatataagactaacagtatgcattatccgaaatattaataacattacatattatatcaatatcacaaaaataaatacacatttggctaatcaatttcgggcttggaaaaaacgtatcgccggaagggactatatgactaacttatctagagatacaggaatacaacaatcaaaacttactgaaactatacgtaactgtcaaaaaaatagaaacatatatggtctatatatacactacaatttagttattaatgtggttattgattggataaccgatgtgattgttcaatcaatattaagagggttggtaaattggtacatagctaataatacctatactccaaatacacccaataatacaacaaccatttctgagttggatatcatcaaaatactggataaatacgaggacgtgtatagagtaagtaaagaaaaagaatgtggaatttgctatgaagttgtttactcaaaacgattagaaaacgatagatactttggtttattggattcgtgtactcatatattttgcataacatgcatcaatatatggcataaaacacgaagagaaaccggtgcgtcggataattgtcctatatgtcgtacccgttttagaaacataacaatgagcaagttctataagctagttaactaataaataaaaagtttaatttgttgacgacgtatgtcgttattttttctcgtataaaagattaatttgattctaatataatctttagtattggataaatatcaattcaaattaattccattagattatatcataaataaaaatagtagcacgcactacttcagccaaatattcttttttgaaacgccatctatcgtagtgaggacacaagtgaacctataatgagcaaatttattagtatcggttacatgaaggactttacgtagagtggtgattccactatctgtggtacgaacggtttcatcttctttgatgccatcacccagatgttctataaacttggtatcctcgtccgatttcatatcctttgccaaccaatacatatagctaaactcaggcatatgttccacacatcctgaacaatgaaattctccagaagatgttacaatgtctagatttggacatttggtttcaaccgcgttaacatatgagtgaacacacccatacatgaaagcgatgagaaataggattttcatcttgccaaaatatcactagaaaaaatttatttatcaattttaaaggtataaaaaatacttattgttgctcgaatattttgtatttgatggtatacggaagattagaaatgtaggtattatcatcaactgattctatggttttatgtattctatcatgtttcactattgcgttggaaataatatcatatgcttccacatatattttattttgttttaactcataatactcacgtaattctggattattggcatatctgtgaataattttagctccatgatcagtaaatattaatgagaacatagtattaccacctaccattatttttttcatttcgttcaattcttgattgcaaagatctatataatcattatagcgttgacttatggactctggaatcttagacgatgtacaggcatctataatcatggcatatttaatacattgttttatagcatagtcgttatctacgatgttagatatttctctcaatgaatcaatcacacaatctaatgtaggtttatgacataatagcattttcagcagttcaatgtttctagattcgttgatggcaatggctatacatgtatatccgttatttgatctaatgttgacatctgaaccggattctagcagtaaagatactagagattgtttattatatctaacagccttgtgaagaagtgtttctcctcgtttgtcaatcatgttaatgtctttaagataaggtaggcaaatgtttatagtactaagaattgggcaagcataagacatgtcacaaagaccctttttgtatgtataagtgtagaaattataacatccatagttggatttacataggtgtccaatcgggatctctccatcatcgagataattgatggcatctcccttccttttttagtagatatttcatcgtgtaagaatcaatattaatatttctaaagtatccgtgtatagcctctttatttaccacagctccatattccaacatgcattccactaaagggatatcgatatcgccgaatgtcatatactcaattagtatatgttggaggacatccgagttcattgttttcaatatcaaagagatggtttccttatcatttctccatagtggtacaatactacacattatttcgtgcggctttccattctccaaaaacaatttgaccaaatctacatctttattgtatctataatcactatttagataatcagccataattcctcgagtgcaacatgttagatcgtctatatatgaataagcagtgttatctattcctttcattaacaatttaacgatgtctatatctatatgagatgacttaatataatattgaagagctgtacaatagtttttatctatagaagacggcttgattccgtgattaattagacatttaacaacttccggacgcacatatgctctcgtatccgactttgaatacagatgcaatacggtaccgcaatttcgtagttgataatcatcatacgcgtatcagtactcgtcctcataaagaacactgcagccattttctatgaacaaatcaataattttaggaacaggatcattgtcattacataattttctataactgaacgatggttttcacatttaacactcaagtcaaatccatgttctaccaacacctttatcaagtcaacgtctacatttttggatttcatatagctgaatatattaaagtcatttatgttgctaaatccagtggcttctagtagagccatcgctatatcctttaactttaacatgtctactatttgtgtattcttctaatggggtagctgtctccaatttttgcgtaatggattagtgccactgtctagtagtagtttgacgacctcaacattattacaatgctcattaaaaaggtatgcgtgtaaagcattattcttgaattggttcctggtatcattaggatctctgtctctcaacatctgtttaagttcatcgagagccacctcctcattttccaaatagtcaaacattttgactgaatgagctactgtgaactctatacacccacacaactaatgtcattaaatatcatgtcaaaaacttgtacaattattaataaaaataatttagtgtttaaattttaccagttccagattttacacctccgttaaccccactggacgatcctcctccccacattccaccgccaccagatgtataagttttagatcctttattactaccatcatgtccatggataaagacactccacatgccgccactactaccccctttagaagacatattaataagacttaagagttaagacaagtttaacaataaaattaatcacgagtaccctactaccaacctacactattatatgattatagtttctatttttacagtaccttaactaaagtctctagtcacaagagcaatactaccaacctacactattatatgattatagtttctatttttataggaacgcgtacgagaaaatcaaatgtctaatttctaacggtagtgttgataaacgattatcgtcaatggatacctcctctatcatgtcgtctattttcttactttgttctattaacttattagcattatatattatttgattataaaacttatattgcttattagcccaatctgtaaatatcggattattaacatatcgtttctttgtaggtttatttaacttgtacatcactgtaagcatgtccgtaccatttattttaatttgacgcatatccgcaatttctttttcgcagtcggttataaattctatatatgatggatacatgctacatgtgtacttataatcgactaatatgaagtacttgatacatattttcagtaacgatttattattaccacctatgaataagtacctgtgatcgtctaggtaatcaactgttttcttaatacattcgatggttggtaatttactcagaataatttccaatatcttaatatataattctgctatttctggaatatatttatctgccagtataacacaaatagtaatacatgtaaacccatattttgttattatattaatgtctgtgccattatctattaaccattctactaggctgacactatgcgacttaatacaatgataaagtatactacatccatgtttatctattttgtttatatcatcaatatacggcttacaaagttttagtatcgataacacatccaactcacgcatagagaaggtagggaataatggcataatatttattaggttatcatcattgtcattatctacaactaagtttccattttttaaaatatactcgacaactttaggatctctattgccaaatttttgaaaatatttatttatatgcttaaatctatataatgtagctccttcatcaatcatacatttaataacattgatgtatactgtatgataagatacatattctaacaatagatcttgtatagaatctgtatatcttttaagaattgtggatattaggatattattacgtaaactattacacaattctaaaatataaaacgtatcacggtcgaataatagttgatcaactatataattatcgattttgtgatttttcttcctaaactgtttacgtaaatagttagatagaatattcattagttcatgaccactatagttactatcgaataacgcgtcaaatatttcccgtttaatatcgcatttgtcaagataataatagagtgtggtatgttcacgataagtataataacgcatctctttttcgtgtgaaattaaatagtttatcacgtccaaagatgtagcataaccatcttgtgacctagtaataatataataatagagaactgttttacccattctatcatcataatcagtggtgtagtcgtaatcgtaatcgtctaattcatcatcccaattataatattcaccagcacgtctaatctgttctattttgatcttgtatccatactgtatgttgctacatgtaggtattcctttatccaataatagtttaaacacatctacattgggatttgatgttgtagcgtatttctctacaatattaataccatttttgatactatttatttctatacctttcgaaattagtaatttcaataagtctatatcgatgttatcagaacatagatattcgaatatatcaaaatcattgatatttttatagtcgactgacgacaataacaaaatcacaacatcgtttttgatattattatttttcttggtaacgtatgcctttaatggagtttcaccatcatactcatataatggatttgcaccactttctatcaatgattgtgcactgctggcatcgatgttaaatgttttacaactatcatagagtatcttatcgttaaccatgattggttgttgatgctatcgcattttttggtttctttcatttcagttatgtatggatttagcacgtttgggaagcatgagctcatatgatttcagtactgtagtgtcagtactattagtttcgatcagatcaatgtctagatctatagaatcaaaacacgataggtcagaagataatgaatatctgtacgcttctttttgtactgtaacttctcgttttgttagatgtttgcatcgtgctttaacatcaatggtacaaattttatcctcgctttgtgtatcatattcgtccctactataaaattgtatattcagattatcatgcgatgtgtatacgctaacggtatcaataaacggagcacaccatttagtcataacagtaatccaaaattttttaaagtatatcttaacgaaagaagttgtgtcattgttaggatttggtaaatcattgtctacggtgtatggtactagatcctcataagtgtatatatctagagtaatgtttaatttatcaaatggttgataatatggatcctcatgacaatttccgaagatggaaatgagatatagacacgcaataaatctaattgcggacatggttactccttaaaaaaatacgaataatcaccttggctatttagtaagtgtcatttaacactatactcatattaatccatggactcataatctctatacgggattaacggatgttctatatacggggatgagtagttctcttctttaactttatactttttactaatcatatttagactgatgtatgggtaatagtgtttgaagagctcgttctcatcatcagaataaatcaatatctctgtttttttgttatacagatgtattacagcctcatatattacgtaatagaacgtgtcatctaccttattaactttcaccgcatagttgtttgcaaatacggttaatcctttgacctcgtcgatttccgaccaatctgggcgtataatgaatctaaactttaatttcttgtaatcattcgaaataatttttagtttgcatccgtagttatcccctttatgtaactgtaaatttctcaacgcgatatctccattaataatgatgtcgaattcgtgctgtatacccatactgaatggatgaacgaataccgacggcgttaatagtaatttactttttcatctttacatattgggtactagttttactatcataagtttataaattccacaagctactatggaataagccaaccatcttagtataccacacatgtcttaaagtttattaattaattacatgttgttttatatatcgctacgaatttaaacagagaaatcagtttaggaaaaaaaattatctatctacatcatcacgtctctgtattctacgatagagtgctactttaagatgcgacatatccgtgtcatcaaaaatatactccattaaaatgattattccggcagcgaacttgatattggatatatcacaacctttgttaatatctacgacaatagacagcagtcccatggttccataaacagtgagtttatctttctttgaagagatattttgtagagatcttataaaactgtcgaatgacatcgcatttatatctttagctaaatcgtatatgttaccatcgtaatatctaaccgcgtctatcttaaacgtttccatcgctttaaagacgtttccgatagatggtctcatttcatcagtcatactgagccaacaaatataatcgtgtataacatctttgatagaatcagactctaaagaaaacgaatcggctttattatacgcattcatgataaacttaatgaaaaatgtttttcgttggatgaatagtatgtcttaataattgttattatttcattaattaatatttagtaacgagtacactctataaaaacgagaatgacataactaatcataactagttatcaaagtgtctaggacgcgtaattttcatatggtatagatcctgtaagcattgtctgtattctggagctattttctttatcgcattagtaagttcagaatatgttataaatttaaatcgaataacgaacatgactttagtaaagtcgtctatattaactcttttattttctagccatcgtaataccatgtttaagatagtatattctctagttactacgatctcatcgttgtctagaatatcacatactgaatctacatccaattttagaaattggtctgtgttacatatctcttctatattattgttgatgtattgtcgtagaaaactattacgtagaccattttctttataaaacgaatatatagtactccaattatctttaccgatatatttgcacacataatccattctctcaatcactacatctttaagattttcgttgttaagatatttggctaaactatataattctattagatcatcaacagaatcagtatatatttttctagatccaaagacgaactctttggcgtcctctataatattcccagaaaagatattttcgtgttttagtttatcgagatctgatctgttcatatacgccatgattgtacggtacgttatgataaccgcataaaataaaaatccattttcatttttaaccaatactattcataattgagattgatgtaatactttgttactttgaacgtaaagacagtacacggatccgtatctccaacaagcacgtagtaatcaaatttggtgttgttaaacttcgcaatattcatcaatttagatagaaacttatactcatcatctgttttaggaatccatgtattattaccactttccattatcccaggctatgtttcgtccatcatcattgcgtagagtaaataattcttttgtattcggtagttcaaatatataatccatgcatagatcggtaaagctattgtagatgtgatttttcctaaatctaatataaaactcgtttactagcaaacactttcctgatttatcgaccaagacacatatggtttctaaatctatcaagtggtggggatccatagttatgacgcagtaacatatattattacattcttgactgtcgctaatatctatatatttattgttatcgtattggattctgcatatagaacacataaccaatttatagtcgcgctttacattctcaaatctacagttaagagatttagaaaacattatatcctcggatgatgttatcactgtttctggagtaggatatattaaagtctttacagatttcgtccgattcaaataaattactaaataatatcccacattatcatctgttagagtagtatcattaaatctattatattttatgaaaaatatatcacttgctcacctctatatttcgtacatttttaaactgtttatataatatctctctgatatatttattgtgtcggtagatgataccgttacatttgaattaatggtgttccattttacaacttttaacaagttgaccaattcatttttaatagtatcaaacgctccatgattaaatattttaatagtatccattttatatcactacggacacaaagtagctgacataaaccattgtataatttttatgttttatgtttattagcgtacacattttggaagttccggctgccatgtatttcctggagagcaagtagatgatgaggaaccagatagtttatatccgtacttgcacttaaagtctacattgtcgttgtatgagtatgatcttttaaacccgctagacaagtatccgtttgatattgtaggatgtggacatttaacaatctgacacgtgggtggatcggaccattctcctcctgaacacaggacaccagagttaccaatcaacgaatatccactattgcaactataagttacaacgctcccatcggtataaaaatcctcgtatccgttatgtcttccgttggatatagatggaggggattggcatttaacagattcacaaataggtgcctcgggattccataccatagatccagtagatcctaattcacaatacgatttagattcaccgatcaaatgatatccgctattacaagagtacgttatactagagccaaagtctactccaccaatatcaagttggccattatcgatatctcgaggcgatgggcatctccgtttaatacattgattaaagagtgtccatccagtacctgtacatttagcatatataggtcccattttttgctttctgtatccaggtagacatagatattctatagtgtctcctatgttgtaattagcattagcatcagtctccacactattcttaaatttcatattaatgggtcgtgacggaatagtacagcatgatagaacgcatcctattcccaacaatgtcaggaacgtcacgctctccaccttcatatttatttatccgtaaaaatgttatcctggacatcgtacaaataataaaaaagcccatatatgtttgctattgtagaaattgtttttcacagttgctcaaaaacgatggcagtgacttatgagtttcatctttagtaaacatatcataatattcgatattacgagttgacatatcgaacaaattccaagtatttgattttggataatattcgtattttgcatctgctataattaagatataatcaccgcaagaacacacgaacatctttcctacatggttaaagtacatgtataattctatccatttgtcttccttaactatatatttgtatagataattacgagtctcataagtaattccagtaattgcatagatgtcaccatcgtactctacagcataaactatactatgatgtctaggcatgggagacttttttatccaacgatttttagtgaaacattctacatcgtttaatactacatatttttcatacgtggtataaactccacccattacatatatatcatcgtttacgaataccgacgcgcctgaatatctaggagtaattaagtttggaagtcttatccatttcgaagtgccgtgtttcaaatattctgccacacccgttgaaatagaaaattctaatcctcctattacatataactttccatcgttaacacaagtactaacttctgattttaacgacgacatattagtaaccgttttccattttttcgtttcaagatctacccgcgatacggaataaacatgtctattgttaatcatgccgccaataatgtatagacaattatgtaaaacatttgcattatagaattgtctatctgtattaccgactatcgtccaatattctgttctaggagagtaatgggttattgtggatatataatcagagtttttaatgactactatattatgttttataccattttgtgtcactggctttgtagatttggatatagttaatcccaacaatgatatagcattgcgcatagtattagtcataaacttgggatgtaaaatgttgatgatatctacatcgtttggatttttatgtatccactttaataatatcatagctgtaacatcctcatgatttacgttaacgtcttcgtgggataagatagttgtcagttcatcctttgataattttccaaattctggatcggatgtcactgcagtaatattgttgattatttctaacatcgacgcattatatagttttttaattccatattgtttagaaaagttaaacatccttatacaatttgtggaattaatattatgaatcatagtttttacacatatatctactacaggcgtaacatcaattattacggcagcaactagtatcatttctacattgtttatggtgatgtttatcttcttccagcgcatatagtctaatagcgattcaaacgcgtgatagtttataccattcaatataatcacttcatcatttatatggtgctcctgaatgcgtttaaaaaaattatacggagacgccgtaataatttccttattcacttgtataatttccccattgatagaaaatatcacgctttccattcttgaagtactataagtaattatagtataatgtaaacgtttatatattcaatatttttataaaaatcattttgacattaattcctttttaaatttccgtctatcatctatagaaacatgttctatgaatttataaaatgcttttacgtgtcctatcgtaggcgatagaaccgctaaaaagcctatcgaatttctacaaaagaatctgttatatggtatagggagagtataaaacattaaatgtccgtacttattaaagtattcagtagccaatcctaactctttcgaatacttattaatggctcttattctgtacgaatctatttttttgaacaacggacctagtggtatatcttgttctatgtatctaaaataatgtcttacgagatccgttagtttaatatccgcagtcatcttgtctagaatggcaaatctaactgcgggtttaggctttagtttagtttctatatctacatctatgtctttatccaacactaaaaatataatagctaatattttattacaatcatccggatattcttctacgatctcactaactaatgtttctttggttatactagtatagtcacgatcagacaaataaagaaaatcagatgatcgatgaataatacatttaaattcatcatctgtaagatttttgagatgtctcattaaaatattattagggtcagtactcattatcatatattggcagcagctattacttattttatttttctgtattttattatttttcaccatatagatcaatcattagatcatcaaaatacttttcaatcatcctaaagagtatggcgaacgaatcttcccatctaatttctgaacgttcaccaatgtctctagccactttggcactaatagcgatcattcgcttagcatcttctatattattaactggttgattcaatctatctagcaatggaccgtcagacagtgtcattctcatgttcttaatcaatgcacatacatcgccgtcatctaccaattcatccaacgacataagatttttaaaatcatcattataataggatggatcgccatcatttctccaaagaatatatctaataagtagagtcctcatgtttagtaatttaactattttagttaataactattttttatgttaaatcaagtagcaccactatgttaatacttattcatattttagtttttaggattgataatcaacataaaaattaatacatcatcaattttggaaatactttgtttccacgtagtcaatgaaacatttgagctcatcgtataggacgttctcgaataggacgtaattatatactggtttatatttgttcaagatagatacaaatccgataacttttttgacgaagtctacgggatccactttaaaagtgtcataccgggttctttttattcttttaaacagatcaatggtgtgatgttgattaggtcttttacgaatttgatacagaatagcgtttacgtatccaccatagtgatcaatcgccatttgttcgtatgtcataaattctttaattatatgacatgttgtattatttagttcatccttgttcatcgttaggaatctatccaaaatggcaattatactagaactataactgcgtcgttgtatacacatatcgatgtgtctgtttatacaatcaatgatattaggatccatgctactaccttcgggtaaaaatgtagcatcatatacctctagtacgttaggttcatcgttacccattgtagaggacgtcataatcgaattctaaaaaaatatattatttttatgttattttgttaaaaataatcatcgaatacttcgtaagatactccttcatgaacataatcagttacaaaacgtttatatgaagtaaagtatctacgatttttacaaaagtcaggatgcataagtacaaagtacgcgataaacggaataataatagatttatctagtctatctttttctatagctttcatagttagatacatggtctcagaagtcggattatgtaacatcagcttcgataaaatgattgggttatttattcttacacattcgctcatacatgtatgaccgttaactacagagtctacactaaaatgattgaacaatagatagtctaccattgcttcgtattcagatagtacagcgtagtacatggcatcttcacaaattatatcattgtctaatagatatttgacgcatcttatggatcccacttcaacagccatcttaaaatcagtagaatcatattgttttcctttatcattaataatttctagaacatcgtctctatcataaaagatacaaatattaactatttgatccgtaataacattgctagtagatagcaatttattaataagttgcgctggggtcaatgtcttaacaagaagggtaagaggactatctccgaatttgttttgtttattaacatccgttgatggaagtaaaagatttatgatgtctacattcttgactggtttagagcatacaatatggagaggtgtatttccatcatgatctggttttgagggactaattcctagtttcatcatccatgagattgtagaagcttttggattgtctgacataagatgtctatgaatatgatttttgccaaatttatccactatcctggcttcgaatccgatggacattatttttttaaacactctttctgaaggatctgtacacgccaacaacggaccacatccttcttcatcaaccgagttgttaatcttggctccataccgcaccaataaatttattctctctatgacttcatcatctgttcccgagagataatatagaggtgttttatgctgtttatcacatgcgttcggatctgcaccgtgtgccaacagcgtcgcaactattctattattgttaattttagaagctatatgtaatggataatttccatcatcgtccgtctcatttggcgagtatcctatatgaagaagttcttcaacaaatcgttcatctagtcctttaattccacaatacgcatgtagaatgtgataatgtccagaaggttcgattgcttgcagcatattcctaaatacatctaaatttttactattatacttggcataaagagatagataatactctgctgacataatgttgtctattgtagtataaaaattaatatttctatttctatttctatttctatatatttgcgacaatttactctctataacaaatatcataacttacttcttttatgtcaagaaagcactggtttagttcatccataaatgtcacgccataactaccgcgcataccatactcagaattacgataaagatatttatccttggggtgtaggtaatggggattaatctttgttggatcagtctctaagttaacacacgtcacacaggatccatttatagttatatcacatgatgatttatgatgaattgattccggaagatcactatcgtattttgtggttccacaattcatttccatacatgttattgtcacactaatattatgatgaactttatctagccgctgagtggtaaacaacagaacagatagtttattatctttaccaactccctcagccgccgctacaaatctctgatccgtatccatgatggtcatgtttatttctagtccgtatccagtcaacactatgttagcatttctgtctatatagctttcactcatatgacactcacccataatagtagaattaatgtcataatttacaccaatagtgagttcggcggcaaagtaccaataccggtaatcttgtcgaggaggacatatagtgttcttgtattcggcagaatacccgagagatacgacacaaaggagtaagactaatttgtaaaccatcttacacaatagtacgatgcaattagcaataagacaatggaaatctatctataacatataattattctatcaattttaccaattagttagtatagtgtttaacaaaaatgttggagaatctaattagtttttccgcgcataattgacgtacatgagtctgagttccttgtttttactaattatttcatccaatttattattcttgacaatatcgaggtcttttgtataggagtcagacttgtattcaacatgcttttctataatcatcttagctatttcggcatcatccaatagtacattttccagattaacagaatagatattaatgtcgtatttgaacagagcctgtagcatttcaaggtctttgttatctatagccaatttgatgtccggaatgaagagaagggaattgttagtgttggtagattccatatagtcaagcaagagaatcatcatatccacgtttccattttttatggagtcgtgaatgcaactgtatagaatagccaggtcaaaagtagatggtatctctgaaagaaagtatgatacaatacttacatcattaagcatgacggcatgataaaatgaagttttccatccagttttcccatagaacatcagtctccaatttttcttaacaaacagttttaccgtttgcatgttgccactatcaaccgcgtaatacaatgcggtgtttcctttgtcatcaaattgtgaatcatccattccactgaatagcaaaatctttgctattttggtatcttctaatgtggctgcctgatgtaatggaaattcattctctagaagatttttcaatgctccagcgttcaacaacgtacatactagacgcacgttattatcggctattgcataatacaaggcactatgtccatggacatccgccttaaatgcatctttgctagagagaaagcttttcagctgcttggacttccaagtattaattcgtgacagatccatgtctgaaacgagacgctaattagtgtataatttttcattttttataattttgtcatactgctccagaattaataatatctctaatagatctgattagtagatatatggctatcgcaaaacaacatatacacatttaataaaaataatattcattaaggagattcagattccaccgtacccatcaatataaataaaataatgattccttacaccgtacccataatattaataattatccttccaccgtaccaatcaatataaataaaataatgattccttacaccgtacccataaacaatattaaggagattccaccttacccataaacaatataaatccagtaatatcatgtctaatgatgaacacaaatggtgtattaaattccagttgttcaggagatgatctagccgtagctaccatgatagtagatgcctctgctacagttccttgttcgtcgacgtctatctttgcattctgaaacattttatagatatataatgggttcctagtcatatgtttaaacgacgccttatctggattaaacatactaggagccatcatttcggctatcgacttaatatccctcttattttcgatagaaaatctagggagtttaagattgtacactttattccctaattgagatgaccaatagtctaattttgcagccgtgatagaatctgtgaaatgagtcatattatcacctattgccaggtacatactaatattagcatccttatacggaaggcgcaccatatcatattcttcatcgtcgacggtgattgtatttccttgcaatttagtaactacgttcatcatgggaaccgttttcgtaccgtacttattagtaaaactagcattgcgtgttttagtgatatcaaacggatattgccacgtacctttaaaatatatagtattaatgattgcccatagagtattattgtcgagcatagtagaatctactacattagacataccggatctacgttctactatagaattaattttattaaccgcatctcgtctaaagtttaatctatataggccgaatctatgatattgttgataataagacggtttaatacatacagtactatcgacgaaactttgataagttagatcagtgtacgtatatttagatgttttcagcttagctaatcccgatattaattctgtaaatgctggacccagatctctttttctcaaatccatagtcttcaataattctactctagtattacctgatgcaggcaatagcgacataaacatagaaaacgaatagccaaacggcgagaagacaatattatcatcctcgtccccatcctgaatatttttatacgctaatataccggcattggtaaatccttgcagacgatatgcggacgccgtacacgctaacgatagtatcaataacgcaatcatgattttatggtattaataatttaccttatttttatgtttagtataaaaaattattgatgtctgcacatccttttgtaattgacatctatatatccttttgtataatcaactctaatcactttaacttttacttttttccctacaagtttatccctatatttaaaatatctatccatatgcatctgaacactctctgccaagatagctgcagagtgaggatagtcaaaaagatcaatatatagagcataatcattctcgtatactctgccctttattacatcgcccgcattgggcaacgaataacaaaatgcgagcatctcgttaacgggctcgtaaattgggataaaaattatgtttttattgttttatatctattttattccagatagtattcaggaatttctttttccggttgtatctcgtcgttgtatatatcatttgtgcattgtttcatattttttaatagtctacatcttttagtaggactagtatcgtacaattcatagctgtattttgaattccaatcacgcataaaaatatcttccaattgttgacgaagacctaatccatcatccggtgtaatattaatagatgctccacatgtatccgtaaagtaattccctgtccaatttgaggttcctatatacgccgttttatctgttaccatatatttggcatggtttaccctagaatatggaattggaggatcggcatccggtacaataaacagttttacttctatatctatgtttttagattttagcatagcgatagatcttaaaaagtttctcataataaacgaagatcgttgccagcaactaatcaatagcttaactgacacttgtctgtctatagcggctcttcttaattcatcttctatatacggccaaaacaaaattttacccgccttcgaataaataatagggataaagttcataacggatacataaacgaatttactcgcatttccgatacatgacaataaagcggttaaatcattagttctttccatagtacatagttgttgtggcgcagaagcaataaatacagaatgtggaacaccgcttacgttcatactaagaggatgatctgtattataatacgcaggataaaagtttttccaattatatggtagattgttaactccaagataccagtatacctcaaaaatttgagtgagatccgctgccaagttactattattgaagatagcaatacccaattccttgacctgagttagtgatctccaatccatgttagcgcttcctaaataaatatgtgtattatcggatatccaaaattttgtatgaagaactcctcctaggatatttgtaatatctatgtatcttacttcaactccggccatttgtagcgtttcaacatcctttaatggtttgttggatttattgacggctactctaacgcgtactcctcttttgggtaattgtataatctcatttaatattatcgtgccgaaattcgtacccacttcatccgataaactccaataaaaagatgatatatctagtgtttttgtggtattggatagaatttccctccacacgttaaatgtagacaaatatactttatcaaattgcatacctataggaatagtctctgtaatcactgcgattgttttatccggattcattttatttgttaaaaaaaataatatcacttcactctattaaaaatccaagtttctatttctttcataactgattttttaacttcgtccgtttccttatgaagatgatgtttggcaccttcataaatttttatttctctattacaatttgcatgttgcatgaaataatatgcacctgaaacatcactaatctcattgtttgttccctggagtatgagactaggggtgttaatcttgggaattatttttctaaccttgttggtagccttcaagacctgactagcaaatccagccttaattttttcatgattgaccaatggatcgtattggtatttataaacttcatccatatctctagatactgattctgggcatagctttccgactggtgcatttggtgtgaagcttcccataagtttggcagctagcatatttagtcttggaacagcttctgtattaactagaggagacattagaatcattgctgtaaataagtctggattctcataagcggccagtatagaaattgttgctcccatggaatgacccaataagaagactggaactcctggataagtagatttaatagtcaccacgtgctgtaccacatctctaacatacgtaccaaagtcatctatcatcattttttcaccattacttcttccatgaccaatatgatcatgtgagaatactaaaattcctaacgatgatatattttcagctagttcatcataacgtccagaatgttcaccagctccatgacttatgaatactaatgccttaggatatgtaataggtttccaatatttacaatatatgtaatcattgtccagattgaacatacagtttgcactcatgattcacgttatataactatcaatattaacagttcgtttgatgatcatattatttttatgttttattgataattgtaaaaacatacaattaaatcaatatagaggaaggagacggatactgtcttttgtgagatagtcatggcgactaaatcagattatgaggatgccgttttttactttgtggatgatgatgaactatgtagtcgtgactccatcatcgatctaatagatgaatatatcacgtggagaaatcatgttatagtgtttaacaaagatatcaccagttgtggaagactgtacaaggaattgatgaagttcgatgatgtcgctatacggtactatggaattgataaaattaatgagattgtcgagactatgagcgaaggagaccactacatcaatctcacagaagtccatgatcaggaaagtctattcgctaccataggaatatgtgctaaaatcactgaacattggggatacaaaaagatttcagaatctagattccaatcattgggaaacattacagatctgatgaccgacgataatataaacatcttgatactttttctagaaaaaaaattgaattgatgacatagtgttataacgcgtaattattatgttaatgcattcttattctatatccggtgttaaaaaaaattatcctatcatgtatttgagagtcttatatgtagcaaacatgatagctgtgatgccaataagctttagatattcacgcgtgctagtgttggggatggtattatctggcggtgaaatgtccgttatataatctacaaaacaatcatcgcatatagtatgcgatagtagagtaaacatttttatagtttctactggattcatacatcgtctacccaattcggttatgaatgaaattgtcgccaatcttacacccaaacccttgttatctattagtatagtattaacttcgttatttatgtcataaactgtaaatgattctgtagatgccatatcatacatgatattcatgtccctattataatcattattaactttatcacaatacatgttgataatatctatatatgatctagtttttgttggcaactgtctatacaagtcgtctaaacgttgtttactcatatagtattgaacagccatcattacatggtcccgttccgttgatagataatcgagtatgttagtggacttgtcaaatctatataccatattttctggaagtggatatacatagttgtgatcatcattatcgctagcctcatcttctatatccggtactataccattatctatatccggtactataccattatctatatccggtactataccattatctataccatcatctacatcatcatctacataatctactatattattatacataaacatcgacaacatactattgtccattatctaagtccagttgatccaaacccttgagctcctctatctgtactatctagagattgtacttcctccagttctggataatatatacgttgatagattagctgagctattctatctcccgtatttacattgaacgtacattttccattattaataagaatgactcctatgtttcccctataatcttcgtctattacaccacctcctatatcaatgccttttagtgacagtccagacctaggagctattctaccatagcagaacttaggcatggacatactaatatctgtcttaattaactgtctttctcctggagggatagtataatcgtaagcgctatacaaatcatatccggcagcacccggcgattgcctagtaggagatttagctctgttagtttccttaacaaatctaactcgtgagttaatattcatgttgctcataaaactaatattttatttcaaaattatttaccatcccatatattccatgaataagtgcgattattatacacttctatagtatctatatacgaaccacgataaaatcctcctatcaatagcagtttattatccactatgatcaattctggattatccctcggataaataggatcatctatcagattccatgtattgctgtattcgcaataaaattcagcatttctaccaaccaagaataaccttctaccgaacactaacgcgcatgatttataatgaggataataagtggatggtccaaactgccactgatcatgatcgggtagcaaatattctgtagttgtatccgtttcagaatgtcctcctattacgtatataacattgtttatagatgcgattgctggattacatctaggtttaagaagactcggcatattaacccaagaagtatccccatggaaccaacgctcgacagatgtgggatttggtagacctcctactacgtataatttattgttagcaggtaccccactagcgtacagtctgggactattcatcggaggaattggaatccaattgtttgatacacaatttaacgctatagcatggttatgtatttcattgttcatccatccaccgatgagatatactacttctccaacatgagtacttgtacacatatggaatatatctataatttgatccatattcataggatactctatgaatggatacctgtatgatttgcgtggtcgtttatcacaatgaaatattttggtacagtctagtatccattttacattatttatacctctgggtgaaagataatttgacctgattacatttttgataaggagtagcaaatttcctaatctatttcttcgcttcatataccacttaatgacaaaatcaactacataatcctcatctggaacatttagttcgtcgctttctagaataagtttcatagatagataatcaaaattgtctatgatgtcatcttccagttccaaaaagtgtttggcaataaagtctttagtatgacataagagattggatagtccgtattctatacccatcatgtaacactcgacacaatattcctttctaaaatctcgtaggataaagtttatacaagtgtagatgataaattctacagatgttaatatagaagcacgtaataaattgacgacgttatgactatctatatatacctttccagtatatgagtaaataactatagaagttagactgtgaatgtcaaggtctagacaaaccctcgtaactggatctttatttttcgtgtatttttgacgtaaatgtgtgcgaaagtaaggagataactttttcaatatcgtagaattgactattatattgcctcctatagcctcaataattgttttgaatttcttagtcatagacaatgctaatatattcttacagtacacagtatttacaaatattggcatttatgtttctttaaaagtcaacatctagagaaaaatgattatcttcttgagacataactcccattttttggtattcacccacacgtttttcgaaaaaattagtttttccttccaatgatatattttccatgaaatcaaacggattggtaacattataaatttttttaaatcccaattcagaaatcaatctatccgcgacaaattctatatatgttttcatcatttcacaattcattcctataagtttaactggaagagccgcagtaagaaattcttgttcaatggataccgcatctgttataatagatctaacggtttcttcactcggtggatgcaataaatgtttaaacatcaaacatgcgaaatcgcagtgcagaccctcgtctctactaattagttcgttggaaaacgtgagtccgggcattaggccacgctttttaagccaaaatatggacgcaaatgacccagaaaagaagattccttctactgcggcaaaggcaacaagtctctctccataactggcgctgtcatgtatccacttttgagcccaatcggccttcttttttacacaaggcatcgtttctatggcattaaagagatagtttttttcattactatctttaacataagtatcgatcaaaagactatacatttccgaatgaatgttttcaatggccatctgaaatccgtagaaacatctagcctcggtaatctgcacttctgtacaaaatcgttcagctaaattttcattcactattccgtcactggctgcaaaaaacgccaatacatgttttataaaatgtttttcgttgggtgttagtttattccaatcattgatatctttagatatatctacttcttccactgtccaaaatgatgcctctgcctttttatacatattccagatgtcatgatattggattgggaaaataacaaatctatttggatttggtgcaaggatcggttccataactaaattaacaatagtagtaaattttttttcagttatcatctatatgactgtatttggatcttttatacattgccattgcagctatcactacaataattacaagtattattgatagcattgttattagtactatcataattaaattatctacatccatgggtgctgaataatcgttattatcatcattttgtaattgtgacatcatactagataaatcatttgcgagattgttgttggaaactgacatggaggatgcgttagcattatcgttattattatttaacgcctcccattctgattcacaaatgttacgtgcgttcaacattttatggaaactataattttgtgaaaacaggtaacaagaaaactcttcatcgttcaaatttttaacaatagtaaaccgattaaacgtcgagctaatttctaacgctagcgactctgttggatatggatttccagatatatatcttttcagctcccctacgtatctataatcatctgtaggaaatggaatgtatttccatctatctagtgttcctaatatcatatatggtggtgtagtagaaccattaagtgtgaaagattttatttcgcatcgtattttaacttcgcaataagattttgttagataacgcacactaccattcaaatcaatgatattagcctttacagatatattcatagtagtcgtgactatgactccatcttttagatgcgatactcccttgtatgtaccagaatcttcgtacctcaaactcgatatatttaaacaagttaatgagatattgacgcgttttatgaatgacgatatatatccagaagtttcatcctctgtggctagcgctataaccttatcattataataccaaagagtatgattaatatgtgatacgtcagtgtgggtacaaatatgtacattatcgtctacgtcgtattcgatacatccgcatacacccaacagatataaaatgataaatactctaacaacgttcgtacccatattgatgcggcttaatacatgttttgatttcaatttattgtaaaaaaagaatcggttttatacggttcgatattcttattctcgtctatcatctccacacagtcaaatccgtggttagcatgcacctcatcaaccggtaatagactatcggactcttctatcattataactcgagaatatttaatttgctcattattaatcaagtcaattatcttatttttaacaaatctgagtattttactcattttttataaaaacttttagaaatatacagactctatcgtgtgtctatatcttctttttatatccaatgtatttatgtctgatttttcttcatttatcatatataatggtccaaattctacacgtgcttcgaattcatccagatcattaatgttcttataatcgtaatatccttctcctcccgcttctacatcttccttcttattcttattcttattcttgtcacagaatctaccacaacaggatcccatgacgagcgtcatattaaactaattcattttcaattataatatactgattagtaatgaccattaaataaaaatattcttcataaccggtaagaaagtgaaaagttcacattgaaactatgtcagtcagtagttatacatcatgaaatgatgatatatatattctctattttggcggaggattatatgatataattcgtggataatcattcttaagacacatttcttcattcgtaaatcttttcacgttaaatgagtgtccatattttgcaatttcttcatatgatggcggtgtacgtggacgatgctgctcctgttcttgttgtggtcgccgactgtcgtgtttgcgtttagatccctccattatcgcgattgcgtagatggagtactatttttataccttgtaattaaatttttttattaattaaacgtataaaaacgttccgtatctgtatttaagagccagatttcgtctaatagaacaaatagctacggtaaaaataactagaataatcgctacacccactagaaaccacggatcgtaatacggcaatcggttttcgataataggtggaatgtatattttatttaaggacttaacaattgtctgtaaaccacaatttgcttccgcggatcctgtattaactatctgtaaaagcatatgttggccgggcggagccgaacattctccgatatccaatttctgtatatctataatgttattaacctccgcatacgcattacagttcttttctagcttggataccgcactaggtaaatcatttaggtctattcctatttcctcagcgatagctcttctatccttttccggaagcaatgaaatcacttcaataaatgattcaaccatgagtgtgaaactaagtcgagaattactcatgcatttgttagttattcggagcgcgcaatttttaaactgtcctataacctctcctatatgaatagcacaagtgacattagtagggatagaatgttgagctaatttttgtaaataactatctataaaaagattatacaaagttttaaactctttagtttccgccatttatccagtctgagaaaatgtctctcataataaatttttccaagaaactaattgggtgaagaatggaaacctttaatctatatttatcacagtctgttttggtacacatgatgaattcttccaatgctgtactaaattctatatctttttcgatttctggatatgtttttaataaagtatgaacaaagaaatggaaatcgtaataccagttatgttcaactttgaaattgttttttattttcttgttaatgattccagccacttgggaaaagtcaaagtcgtttaatgcagatttaatacgttcattaaaaacaaactttttatcctttagatgaattattattggttcattggaatcaaaaagtaagatattatcgggtttaagatcagcgtgtaaaaagttgtcgcaacagggtagctcgtaaactttaatgtataacagagacatctgtaaaaagataaactttatatattgtaccaaagatttaaatcctaatttgatagctaactcggtatctactttatctgccgaatacagtgctaagggaaaaattataatgtttcctctttcgtattcgtagttagttctcttttcatgttcgaaaaagtgaaacatgcggttaaaatagtttataacattaatattactgttaataactgccgggtaaaaatgggatagtaatttcacgaatttgatactgtcctttctctcgttaaacgcctttagaaaaactttagaagaatatctcaatgatagttcctggccatccatagtttgtatcaataataacaacatatgaagaacccgtttatacagagtatgtaaaaatgttaatttatagtttaatcccatggcccacgcacacacgattaattttttttcgtctccctttagattattgtacagaaatttgggtactgtgaactccgcagtagtttccatgggactatataattttgtggcctcgaatacaaattttactacatagttatctatcttaaagactataccatatcctcctgtagatatgtgataaaaatcgtcgtttataggataaaatcgtttatccttctgttggaaaaaggatgaattaatgtaatcattctcttctatctttagtagtgtttccctattaaaattcttaaaataatttaacaatctaactgatggagcccaattttggtgtaaatctaattgggacattatattgttaaaatacaaacagtctcctaatataacagtatctgataatctatggggagacatccattgatattcaggggatgaatcattggcaacacccatttattgtacaaaaagccccaatttacaaacgaaagtccaggtttgatagagacaaacaattaactattttgtctctgtttttaacacctccacagtttttaatttctttggtaatgaaattattcactatatcagtatcttctttatctaccagagattttactaacttgataaccttggctgtctcattcaatagggtagtgatatttgtatgtgtgatattgatatctttttgaattgtttcttttagaagtgattctttgatagtgtcagcatacgaattacaataatgcagaaactcagttaacatgcaggaattatagtaagccaattccaattgttgcctgtattgtattagagtgtcaatatgtgcaatggtgtccttgcgtttctctgatagaatgcgagcagcgattttggcgttatcatttgacgatatttctggaatgatgaatcctgtttctactaactttttagtaggacaaagcgaaacaatcaagaagatagcttctcctcctatttgtggaagaaattgaactcctctagatgatctactgacgatagtatctccttgacagatattggaccgaattacagaagtacctggaatgtaaattcctgaaacgccctcattttttaaacagattgttgcagtaaatcccgcactgtgaccaagatagagagctcctttggtgaatccatctctatgtttcagtttaaccaaaaaacagtcagctggtctaaaatttccatctctatctaatacagcatccaacttgatgtcgggaaccataaccggtttaatgttatatgtaacattgagtaaatccttaagttcataatcatcactgtcatcagttatgtacgagccaaacaatgtttctaccggcatagtggatacgaagatgctatccatcagaatgtttccctgattagtgttttctatatagctattcttctttaaacgattttccaaatcagtaactatgttcatttttttaggagtaggacgcctagccagtatggaagaggattttctagatcctctcttcaacatctttgatctcaatggaatgcaaaaccccatggtgtaacaaccaacgataaaaataatattgtttttcactttttataattttaccatctgactcatggattcattaatatctttatacgagctactaatgtacaattctttataactgaactgagatatatacatttgatctatggtttccatgattgagtaaatgaatgctctgcaataactaatggcaaatgtatagaacaacgaaattatactagagttgttaaagttaatattttctatgagctgttccaataaattatttgttgtggctgcgttcaagtcataaatcatcttgatactatccagtaaacagtctttaagttctggaatattatcatcccattgtaaagcccctaattcgactatcgaatatcctgctctgatagcagtttcaatatcgacggacgtcaatactgtaataaaggtggtagtattgtcatcatcgtgataaactacgggaatatggtcgttagtaggtacggtgactttacacaacgcgatatataactttccttttgtaccatttttaacgtagttgggacgtcctgcaggatattgttttgaagaaatgatatcgagaacagatttgatacgatatttgttggattcctgattattcactataatataatctagacagatagatgattcgataaatagagaagatatatcgttggtaggataatacatccccattccagtattctcggatactctattgatgacactagttaagaacatgtcttctattctagaaaatgaaaacatcctacacggactcattaaaacttctagcgctcctgattgtgtctcgaatgcctcaaacaaggatttcaaggatgccatagattctttgaccaatgatttaatattgcgtttagcatctgatttttttattaaatcgaatggtcggctctctgatttactaccccaatgataacaatagtcttgtaaagataagccgcaagaaaatttatacgcatccatccaaataactctagcaccatctgatgatattagtgtattattatagattttccatccacagttattgggccagtatactgttagcaacggtatatcaaatagattactcatgtaacctactagaatgatagttcgtgtactagtcataatatctttaatccaatctaagaaatctaaaattagatcttttacactgttaaagttaacaaaggtattacccgggtacgtggatatcatatatggtattggtccattatcagtaatagctccataaactgatacggcgatggtttttatatgtgtttgatctaacgaggaagaaattcgcgcccacaattcatctctagatatgtatttaatatcgaacggtaacacatcaatctcgggacgcgtatatgtttctaaattcttaatccaaatataatgatgacctatatgccctattatcatactgtcaactatagtatacctagagaacttacgatacatctgtttcctgtaatcgttaaattttacaaatctataacatgctaaaccttttgacgacagccattcattaatttctgatatggaatctgtattctcgataccgtatcgttctaaagccagtgctatatctccctgttcgtgggaacgctttcgtataatatcgatcaatggataatctgaagtttttggagaataatatgactcatgatctatttcgtccataaacaatctacacataggaattggaggcgatgatcttaattttgtgcaatgagtcaatcctataacttctaatcgtgtaatattcatcatcgacataacactatctatgttatcatcgtatattagtataccacgaccttcttcatttcgtgccaaaatgatatacagtcttaaataattacgcaatatctcaatagtttcataattgttagctgttttcatcaaggtttgtatcctgtttaacatgatggcgttctataacgtctctattttctatttttaattttttaaatttttaacgatttactgtggctagatacccaatctctctcaaatatttttttagcctcgcttacaagctgtttatctatactattaaaactgacgaatccgtgattttggtaatgggttccgtcgaaatttgccgaagtgatatgaacatattcgtcgtcgactatcaacaattttgtattattctgaatagtgaaaaccttcacagatagatcattttgaacacacaacgcgtctagacttttggcggttgccatagaatatacgtcgttcttatcccaattaccaactagaagtctgatcttaactcctctattaatggctgcttctataatggagttgtaaatgtcgggccaatagtagctattaccgtctacacgtgtagtgggaactatggccaaatgttcaatatctatactagtcttagccgacttgagtttatcaataactacatcagtgtctagatctctagaatatcccaataggtgttctggagaatcagtaaagaacactccacctataggattcttaatatgatacgcagtgctaactggcagacaacaagccgcagagcataaattcaaccatgaattttttgcgctattaaaggctttaaaagtatcaaatcttctacgaagatctgtggccagcgggggataatcagaatatacacctaacgttttaatcgtatgaatagatcctccagtaaatgacgcatttcctacataacatctttcatcatctgacacccaaaaacaaccgagtagtagccccacattattttttttatctatgttaacagttataaaatttatatccgggcaataactttgtagctctcccagatttcttttccctcgttcatctagcaaaactattattttaacccctttttcagatgcctcttttagtttatcaaaaataagagctcccctagtagtactcataggattacaacaaaaagatgctatgtatatatatttcttggctagagtgataatttcgttaaaacattcaaatgtagtcaaatgatcggatctaaaatccatattttctggtagtgtttctaccagcctacattttgctcccgcaggtactgatgcaaatggccacatttagttaacataaaaacttatacatcctgttctatcaacgattctagaatatcatcggctatatcgctaaaattttcatcaaagtcaacatcacaacctaactcagttaatatattaagaagttccatgatttcatcttcgtctatttccatatccatatccattgtagattgttgactgattatcgagtttaaatcagtattaatacccaattcttcagaatacactcggtgtttcatcgtaaccctctatcagtaacgtatttaagttggtagattttcaattatgtatcaatatagcaacagcagttcttgctcctccttgattctagtatcctcttcattattttcttctacgtacataagcatgtccaatacgtttgacaacatgccgacgatggcggctgccacagatacgaatatgactaaaccgatgaccatttaaaaaccactctctagctttcacttaaacttatagatcattcttttagcacatgtataatataaaaacattattctatttcgaatttaggcttccaaaaatttttcatccgtaaaccgataataatatatatagacttgttaatggtcggaataaacagattaatgcttaaactatcgtcatcaccacgattagagatacaatacttacattctttttgctgtttcgaaactttatcaatacacgttaatacaaacccaggaaggagatattgaaactgaggctgttgaaaatgaaacggtgaatacaatagttcagataatgtaaaatcatgattccgtattctgatagtattagaactgttaatggatgcagatggaacgtatctaggtgtatctattttaacaaagcatcgatttgctaatatacaattatccttttgattaattgttattttattcatattcttaaaaggtttcatatttatcaattcttctacattaacaatttccatttttaatttatgcagccccgcaatactcctcattacgtttcattttttttctagaatatccattttgttcatttcggcacatagattatccaattgagaagtgcatttagtagttttgtatattttaagtttattgacgaatcgtcgaaaattagttatagttaacattttattatttgataccctgatattaatacccctgccgttactattatttataactgatgtaacccatgtaacattagaattaattatcgatagtaatgcatcaacgcttccaaaattgtctattataaactcaccgataatttttttattgcatgttttcatattcattaggattatcaaatctttaatcttcttacgattgtatgcgttgatattacaagacgtcattctaaaagacggaggatctccatcaaatgccagacaatcacgtacaaagtacatggaaataggttttgttctattgcgcatcatagattcatatagaactcccatagaaatactaatttgttttactctataaaatactaatgcatctatttcatcgttatgtataacgtctttccaagtgtcaaattccaaatttttttcattgatagtaccaaattcttctatctctttaactatttgcatagataggtaattacagtggtgtctacaagctgttttttgaaactgaatcgatgcatctagaagcgatgctacgctagtcacaatcaccgctttcatatttagaatatatgtatgtaaaaatatagtagaatttcattttgtttttttctatgctataaatgaattctcattttgcatctgctcatactccgttttatatcaataccaaagaaggaagatatctggttctaaaagccgttaaagtatgcgatgttagaactgtagaatgcgaaggaagtaaagcttcctgtgtactcaaagtagataaaccctcatcacccgcgtgtgagagaagaccttcgtccccgtccagatgcgagagaatgaataaccctggaaaacaagtcccgtttatgagaacggacgtgctacaaaatatgtttgctgctaatcgcgacaacgtggcgtcgagacttttgaactaaaatacaattatatctttttcgatattaataaatccgtgtcgcccgggttttttatctctttcagtatgtgaatagataggtattttatctctattcatcatcgaatttaagagatccgataaacattgtttgtattctcccgatgtcagcatctgatacaacaatatatgtgcacataaacctctggcacttatttcatgtaccttccccttatcactaaggagaatagtatttgagaaatatgtatacatgatattatcatgaattagatatacagaatttgtaacactctcgaaatcacacgatgtgtcggcattaagatctaatatatcgctcgataacacattttcatctagatacactagacattttttaaagctaaaatagtctttagtagtaacagtaactatgcgattattttcatcgatgatacatttcatcggcatattattacgcgtaccatcaaagactataccatgtgtatatctaacgtattctagcatagttgccatacgcgcattaaacttttcaggatctttggatagatcttccaatctatctatttgagaaaacatttttatcatgttcaatagttgaaacgttggatccactatatagatattatctataaagattttaggaactacgttcatggtatcctggcgaatattaaaactatcaatgatatgattatcgttttcatcttttatcaccatatagtttctaagatatgggattttacttaatataatattatttcccgtaataaattttattagaaatgccaaatctataagaaaagtcctcgaattagtttgaagaatatctatatcgccgtaccgtatatttggattaattagatatagagaatatgatccgtaacatatacaactcttattatggcgtctaagatattcttccatcaacttattaacatttttgactagggaagatacattatgacgtcccattacttttgccttgtctattaccgcgacgttcatagaatttagcatatctcttgccaattcttccattgatgttacattataagaaattttagatgaaattacatttggagctttaatagtaagaactcctaatatatccgtgtatgtggtcactaatacagattgtagttctataatcgtaaataatttacctatattatatgtttgagtctgtttagaaaagtagctaagtatacgatcttttatttctgatgcagatgtatcaacatcggaaaaaaatctttttttattcttttttactaacgatacaaatatgtctttgttaaaaacagttattttctgaatatttctagcttgtaattttaacatatgatattcgtttacactaggtattctgcctaaataggtttctataatctttaatgtaatattaggaagagtattctgatcaggattcctattcattttgaggatttaaaactctgattattgtctaatatggtctcaacgcaaactttttcacagagcgatagagtttttgataactcgtttttcttaagaaatataaaactactgtctccagagctcgctctatcttttattttatctaattcgatacaaactcctgatactggttcagaaagtaattcattaattttcagtcctttatagaagatagttaatatagatagtacaaaatcttcagttcttgataccgatcggattgatcctagaactagatatattaataaagtactcattaggcagtttatggcagcttgataattagatatagtatattccagttcatatttattagataccgcattgcccagattttgatattctatgaattcctctgaaaataaatctaaaataactagacattctattttttgtggattagtgtactctcttccctctatcatgttcactactggtgtccacgatgacaaatatctagagggaatataatatagtccataggatgccaatctagcaatatcaaataactgtaattttattcttctctcttcattatgaattaattcttgaggtataaacctaacacaaattatattattagacttttcgtatgtaatgtctttcatgttataagtttttaatcctggaatagaatctatcttaatgaggcttttaaatgcggagttctccaacgagtcaaaacataatactctgttgtttttcttatatacgatgttacgattttcttctttgaatggaataggtttttgaattagtttataattacaacataatagatacggaagtgtacaaatagtacgcggaaaaaacataatagctcccctgttttcatccatggttttaagtaaatgatcactggcttccttagtcaatggatattcgaacattaaccgtttcatcatcattggacaaaatccatatttcttaatgtaaagagtaatcaaatcattgtgtttattataccatcttgttgtaaatgtgtattctgttatcggatctgctcctttttctattaaagtatcgatgtcgatctcgtctaagaattcaactatatcgacatatttcatttgtatacacataaccattactaacgtagaatgtataggaagagatgtaacgggaactgggtttgttgattcacaaactattctaatacatagttcttctgttaatacgtcttgtacgtaatctattatagatgccaagatatctatataattattttgtaatatgatgttaactatgtgatctatataagtagtgtaatatttcatgtatttggatatatgttccaactctgtctttgtgatgtctagtttcgtaatatctatagcatcctcaaaaaatatattcgcatatattcccaagtcttcagttctatcttctaaaaaatcttcagcgtatggaatataataatctattttgcctcttctgatgtcattaatgatatagtttttgacactattttccgtcaattgattcttattcactatatctaagaaacggatagcgtccctaggacgaactactgccattaatatctctattatagcttctggacataattcatctattataccagaattaatgggaactattccgtatctatctaacatagttttaagaaagtcagaatctaagacctgatgttcatatattggttcatacatgaaatgatctctattgatgatagtgactatttcattctctgaaaattggtaactcattctatacacgctttccttgttgataaaggatagtatatactcgatggaatttgtaccaacaaactgttctcttatgaatcgtatatcatcatctgaaataatcatgtaaggcatacacttaacaattagagacttgtctcctgttatcaatatactattcttgtgataatttatgtgtgaggcaaatttgtccacgttttttaattttgttatagtagatatcaaatccaatggagctacagttcttggcttaaacagatatagtttttctggaacgaattctacaacattattataaagaactttgggtagataagtgggatgaaatcctattttaattaatgcgatagccttgtcctcgtgcagatatccaaacgcctttgtgatagtatgacattcattgtctagaaacgctctacgaatatctgtaacagatatcatctttagagaatactagtcgcgttaatagtactaaaatttgtattttttaatctatctcaataaaaaaattaatatgtatgattcaatgtataactaaactactaactgttattgataactagaactagaatcagaatctaatgatgacgtaaccaagaagtgtatctacagccaatttagctgcattatttttagcatctcgtttagattttccatctgccttatcgaatactcttccgtcgatgtctacacaggcataaaatgtaggagagttactaggccccactgattcaatacgaaaagaccaatctctcttagttatttggcagtactcattaataatggtgacagggttagcatctttccaatcaataatttttttagccggaataacatcatcgaaagacttatgatcctctctcattgatttttcgcgggatgcatcatctattatggaatcagccatagcatcagcatccggcttatccgcctccattgtcgtaaaccaacgaggaggaatatcgtcggagctgtacaccatagcactacgttgaagatcgtacagagctttattaacttctcgcttctccatattaagttgtctagttagttgtacagcagtagctccttcgagtccaatgtttttaatagcctcacacacaatctctgcgtcagaacgttcgtcgatatagatcttagacatttttagagagaaatgacgcaaaaccagtaataaaactaatctattttatcatttttattcatcatcttctggtggttcgtcgttcctatcgaatgtggctctgattaacccgtcatctataggcgatgctggttctggagattctggaggagatggattattatctggaagaatctctgttatttccttgttttcatgtatcgattgcgttgtaacattaagattgcgaaatgctctaaatttgggaggcttgaagtgttgtttgcaatctctacacgcgtgtctaactaatggaggttcatcagcagctctagtttgaatcatcatcggtgtagtattcctacttttacagttaggacacggtgtattgtatttctcgtcgagaacgttaaaataatcgttgtaactcacatcctttattttatctatattgtattctactcctttcttaatgcattttataccgaacaagagatagcgaaggaattctttttcggtaccgctagtacccttaatcatgtcacatagtgttttatattccaaatttgtggcaatggacggtttatttctatacgatagtttgtttctggaatcctttgagtattctataccaatattattctttgattcgaatttagtttcttcgatattagattttgtattacctatattcttgatgtagtactttgatgatttttccatggcccattctattaagtcttccacgctggtattatcatccacatattgtgatagtaactctcggatatcagtagcggctaccgccattgatgtttgttcatttgatgagtaactactactaatgaatacattttccatttataacacttatgtattaactttgatcatttatattttttcattattatgttgatattaacaaaagtgaatatatatgttaataattatggtgtggtgtgtacggccacaatttcataatgagtggaagtcagtgtcctatgatcaatgacgatctatttagagttactttgaaaagaatgcatccactcaatagtgaggagtcgagtatgaaaatagataagaagaggacaaagtttcagaatagagccaaaatggtaaaagaaataaatcagacaataagagcagcacaaactcattacgagacattgaaacaaggatacctaaaatttaagagaatgattagaactgctactctaaaagatatagcaccatctattccaaaaattcagaaattttataaactattctcggacatttcagccatcagcaaagcatcacagaatccgagtaagatggtatatgctctactgctttacatgtttcccaatttgtttggagatgaccatagattcattcgttatagaatgcatccaatgagcaaaatcaaacacaagatcttctccccgttcaaacttaatcttattagaatattagtggaagaaagattctataataatgaatgcagagattataaatggagaataattggaacacaagttgataaaatattgatagctgaatctgctaaatatacaatagatgcaaggtatcgcctaagacctatatatagaatcaagggagaatctgaagaagataccctcttcatcaaacagatggtagagaaatgtgtaacgtctcaggaattggtggagaaagtgttgaagatactgtttaaagatttgttcaagagtggagaatacaaagattacagatacgatgatgatgtagacaatggattcattggattggacaaactaaaattaaacattgttcacgatatagttgaaccatgtatgcctgttcgtaggccagtggctaaggtactgtgtaaagaaatggtaaataaatactttgagaatcctctacatatcattggtaagaatctccaagagtgcattgactttgttagtgagtaggcatttcatcttttcctttctcaatactattcaacttgttaaattaataatggatagtttaaaatagttattagtagtaataagatagtttaaaatagttattagtagtaataagatagtttaaaatagttattagtagtaataagatagtttaaaatagtataaaatagataagtatttactctcttctataaaaatggattttattcgtagaaagtatcttatatacacagtagaaaataatatagattttttaaaggatgatacattaagtaaagtaaacaattttaccctcaatcatgtattagctctcaagtatctagttagcaatttcccccaacatgttattactaaggatgtattagctaataccaatttttttgttttcatacatatggtacgatgttgtaaagtgtacgaagcggttttacgacacgcatttgatgcacccacgttgtacgttaaagcattgactaagaattatttatcgtttagtaacgcaatacaatcgtacaaggaaaccgttcataaactaacacaagatgaaaaatttttagaggtagccgaatacatggaagaattaggagaacttataggggtaaattatgacttagttcttaatccattatttcacggaggggaacccatcaaagatatggaaatcatttttttaaaactatttaagaaaacagacttcaaagttgttaaaaaattaagtgttataagattacttatttgggcatacctaagcaagaaagatacaggcatagagtttgcggataatgatagacaagatatatatactctatttcaacaaactggtagaatagtccatagcaatctaacagaaacgtttagagattatatctttcccggagataagactagctattgggtgtggttaaacgaaagtatagctaatgatgcggatatcgttcttaatagacccgccattaccatgtatgataaaattcttagttatatatactctgagataaaacagggacgcgttaataaaaacatgcttaagttagtttatatctttgagcctgaaaaagatatcagagaacttctgctagaaattatatatgatattcctggagatatcctatctattattgatgcaaaaaacgacgattggaaaaaatattttattagtttttacaaagctaattttatcaacggtaatacatttattagtgatagaacgtttaacgaggacttattcagagttgttgttcaaatagatcccgaatatttcgataatgaacgaattatgtctttattctctacgagtgctgcggacattaaacgatttgatgagttagatattaataacagttatatatctaatataatttatgaggtgaacgatataacattagatacaatggatgatatgaagaagtgtcaaatctttaacgaggatacatcgtattatgttaaggaatacaatacatacctgtttttgaacgagacggatcccatggtcatagagaacggaatactaaagaaactgtcatctataaaatccaagagtagacgactgaacttgtttagcaaaaacattttaaaatattatttagacggacaattggctcgtctaggtcttgtgttagatgattataagggagacttgttagttaaaattataaaccatctcaagtctgtggaggatgtatcagcattcgttagattttctacagataaaaaccctagtattcttccatcgctaatcaaaactattttagctagttataatatttccatcatcgtcctatttcaaaagtttttaagagataatctatatcatgtagaagaattcttggataaaagcatccatctaaccaagacggataagaaatatatacttcaattgataaggcacggcagatcatagaacaaaccaaatatacatattaaaaattcacacatttttgataaatgggaactgctgcaacaattcagactcccaccaaattaatgaataaagagaatgcagaaatgattttggaaaaaattgttgatcatatagttatgtatattagtaacgaatcaagtgatgaaaataatcctgaatatattgattttcgtaacagatacggagactatagatctctcattataaaaagtgatcacgagtttgtaaagctatgtaaagatcatgccgagaaaagttctccagaaacacaacaaatgataatcaaacacatctacgaacaatatcttattccggtatctgaagtactattaaaacctatgatgtccatgggtgacataattacatataacggatgtaaagacaatgaatggatgatagaacaactctctaccctaaactttaacaatctccgcacatggaactcatgtagcataggcaatgtaacgcgtctgttttatacattttttagttatctgatgaaagataaactaaatatataagtataatcataatcccattctaatactttaacctgatgtattatgtatcacctgcatcttattagaatattaacctaactaaaagacataacataaaaactcattacatagttgataaaaagcggtaggatataaatattatggctgccgccgttccgcgttttgacgacgtgtacaaaaatgcacaaagaagaattctagatcaagaaacattttttagtagaggtctaagtagaccgttaatgaaaaacacatatctatttgataattacgcgtatggatggataccagaaactgcaatttggagtagtagatacgcaaacctagatgctagtgactattatcccatttcgttgggattacttaaaaagtttgagtttctcatgtctctatataaaggtcctattcccgtatatgaagaaaaaataaatactgaattcattgctaatggatctttctccggtagatacgtatcatatcttagaaagttttctgcccttccaacaaacgagtttattagttttttattattgacctccatccctatctataatatcttattctggtttaaaaacacacagtttgatattactaaacacacattattcagatacgtctatacagataatgccaaacacctggcgttggctaggtatatgtatcaaacaggagactataagcctttgtttagtcgtctcaaagagaattatatatttaccggtcctgttccgataggaatcaaagatatagatcaccctaatcttagtagagcaagaagtccatccgattatgagacattagctaatattagtactatattgtactttaccaagtatgatccagtattaatgtttttattgttttacgtacctgggtattcaattactacaaaaattactccagccgtagaatatctaatggataaactgaatctaacaaagagcgacgtaaaactgttgtaaattattttatgcttcgtaaaatgtaggttttgaaccaaacattctttcaaagaatgagatgcataaaactttattatccaatagattgactatttcggacgtcaatcgtttaaagtaaacttcgtaaaatattctttgatcactgccgagtttaaaacttctatcgataattgtttcgtatgttttaatatttacaagttttttggtccatggtccattaggacaaatatatgcaaaataatatcgttctccaagttctatagtctctggattatttttattatattcagtaaccaaatacatattagggttatctgcggatttataatttgaatgatgcattcgactcaacataaacaattctagaggagacgacctactatcaaattcggatcgtaaatctgtttctaaagaacggagaatatctatacatacctgattagaattcatccgtccttcagacaacatctcagacagtctggtcttgtatatcttaatcatgttcttatgaaacttggaaacatctcttctagtttcactagtacctttattaattctctcaggtacagattttgaattcgacgatgccgagtatttcatcgttgtatatttcttcttcgattgcataattagattcttatatacagcctcaaactctattttaaaattattaaacaatactctactattaatcagtcgttctaactcctttgctatttctatggacttatcgacatcttgactgtctatctctgtaaacacggagtcggtatctccatacacgctacgaaaacgaaatctgtaatctataggcaacgatgttttcactatcggattaatatctctatcgtccatataaaatggattacttaatggattggcaaaccgtaacataccgttagataactctgctccatttagtaccgattctagatacaagatcattctacgtcctatggatgtgcaactcttagccgaagcgtatgagtatagagcactatttctaaatcccatcagtccatacaccgagttggctactatcttgtacgtatattgcatggaatcatagatggccttttcagttgaactggtagcctgttttaacatctttttatatctggctctctctgccaaaaatgttctcaatagtctaggaatggttccttctatcgatctatcgaaaattgctatttcagagatgaggttcggtagtctaggttcacaatgaaccgtaatatatctaggaggtggatatttctgaagtaagagctgattatttatttcttcttccaatctattggtactaacgacgacaccgactaatgtttccggagatagatttccaaagatacacacattaggatacagactgttataatcaaagattaatacattattactaaacattttttgttttggagcaaataccttaccgccttcgtatggaaacttttgttttgtttctgatctcactaagatggttttagtttccaacaatagctttaacagtggacccttgatgactgtactcgctctatattcgaataccattgattgaggaagcacatatgttgacgcacccgcatctgtttttgtttctactccgtaatactcccacaaatactgacacaagcaagcatcatgaatacagtatctagccatatctaaagctatgtttagattataatccttatacatctgtgctagatcaacgtcatcctttccgaaagataatttatacgtatcatttgttaaagtgggacacgatagaacgaccttgaatccattttcccaaatatctttatgaattactttacatataatatcatcatcaaccgtcacataattacccgtggttaaaacctttgcgaatgcagcggctttgcctttagcgtccgtagtatcgtcaccgatgaacgtcatttctctaactcctctatttaatactttgcccatgcaactgaacgcgttcttggatatagaatccaatttgtacgaatccaatttttcagacttttgaatgaatgaatacagatcgaaaaatatagttccattattgttattaacgtgaaacgtagtattggccatgccacctactcccttgtgactagactgatttctctcataaatacagagatgtacagcttcctttttgtctggagatctaaagataatcttctctccggttaataactctagacgattagtaatatatctcagatcaaagttatgtccgttaaaggtaacgatatagtcgaacgttagttccaacaattgtttagctatttgtagcaaaactatttcagaacacagaactagttctcgttcataatccatttccatcagtgactgtatcctcaaacatcctctatcgacggcttcttgtatttcctgttccgttaacatctcttcattaatgagcgtaaacaataatcgtttaccgcttaaatcgatataacagtaacttgtatgcgagattggattaataaatacagaaggaaatttcttatcaaagtgacactctatatctagaaataagtacgatcttggaatatcgaatctaggtatttctttagcgaaacagttacgtggatcgtcgcaatgataacatccattgttaatctttgtcaaatattgctcgtccaacgagtaacatccgtctggagatatcccgttagaaatataaaaccaactaatattgagaaattcatccatggtggcattttgtatgttgcgtttctttggctcttctatcaaccacatatctgcgacggagcattttctatctttaatatctaaattataacttatcgtctcatcaatgtctatagttctcatctttcccatcggtctcgcattaaatggaggaggagccaatgactgatatatttcgtccgtcactacgtaataaaagtaatgaggaaatcgtataaatacggtctcgccatttcgacatctggatttcagatataaaaatctgttttcaccccgactttcgaaccaattaatgcaccgaacatccatttctagaatttagaaatatattttcatttaaatgaatcccaaacattggggaagagccgtatggaccattatttttatagtactttctcaagcgggtttagacggcaacatagaagcgtgtaaacgaaaactatatactatagtcagcacgcttccatgtcctgcatgtagacggcacgcgactatcgctatagaggacaataatgtcatgtctagcgatgatctgaattatatttattattttttcatcagattatttaacaatttggcatctgataccaaatacgcaatcgatgtgtcaaaggttaaacctttataaacttaacccattataaaacttatgattagtcacgactgaaataacggcgtgattattttttggtataattctacacggcatagtttctgtgactatgaattcaacacccgttatcttagtgaaatctttaacaaacagcaagggttcgtcaaagacataaaactcattgtttacgatcgaaatagatcccctatcacacttaaaataaaaaatatccttatcctttaccaccaaataaaattctgattggtcaatgtgaatgtattcacttaacagttccacaaatttatttattaactccgaggcacatacatcgtcggtattttttatggcaaactttactcttccagcatccgtttctaaaaaaatattaacgagttccatttatatcgtccaatattattgaaatgacgttgatggacagatgatacaaataagaaggtacggtacctttgtccaccatctcctccaattcatgctctattttgtcattaactttaatgtgtgaaaacagtactccacatgcttccatgacagtgtgtaacactttggatacaaaatgtttgacattagtataattgtccaagactgtcaatctataatagatagtagctataatatattctatgatggtattgaagaagatgacaaccttggcatattgatcatttaacacagacatggtatcaacagatagcttgaatgaaagagaatcagtaattggaataagcgtcttctcgatggagtgtccgtataccaacatgtctgatattttgatgtattccattaaattatttagttttttctttttattctcgttaaacagcatttctgtcaatggaccccaacatcgttgaccgattaagttttgattgatttttccatgtaaggcgtatctagtcagatcgtatagcctatccaataatccatcatctgtgcgtagatcacatcgtacactttttaattctctatagaagagcgacagacatctggagcaattacagacagcaatttctttattctctacagatgtaagatacttgaagacattcctatgatgatgcagaattttggataacacggtattgatggtatctgttaccataattcctttgatggctgatagtgtcagagcacaagatttccaatctttgacaatttttagcaccattatctttgttttgatatctatatcagacagcatggtgcgtctgacaacacagggattaagacggaaagatgaaatgattctctcaacatcttcaatggataccttgctattttttctggcattatctatatgtgcgagaatatcctctagagaatcagtatcctttttgatgatagtggatctcaatgacatgggacgtctaaaccttcttattctatcaccagattgcatggtgatttgtcttctttcttttatcatgatgtaatctctaaattcatcggcaaattgtctatatctaaaatcataatatgagatgtttacctctacaaatatctgttcgtccaatgttagagtatctacatcagttttgtattccaaattaaacatggcaacggatttaattttatattcctctattaagtcctcgtcgataataacagaatgtagataatcatttaatccatcgtacatggttggaagatgcttgttgacaaaatctttaattgtcttgatgaaggtgggactatatctaacatcttgattaataaaatttataacattgtccataggatactttgtaactagttttatacacatctcttcatcggtaagtttagacagaatatcgtgaacaggtggtatattatattcatcagatatacgaagaacaatgtccaaatctatattgtttaatatattatatagatgtagcgtagctcctacaggaatatctttaactaagtcaatgatttcatcaaccgttagatctattttaaagttaatcatataggcattgatttttaaaaggtatgtagccttgactacattctcattaattaaccattccaagtcactgtgtgtaagaagattatattctatcataagcttgactacatttggtcccgataccattaaagaattcttatgatataaggaaacagcttttaggtactcatctactctacaagaattttggagagccttaacgatatcagtgacgtttattatttcaggaggaaagaatctaacattgagaatatcggaattaatagcttccagatacagtgattttggcaatagtccgtgtaatccataatccagtaacacgagctggtgcttgctagacaccttttcaatgtttaatttttttgaaataagctttgataaagccttcctcgcaaattccggatacatgaacatgtcggcgacatgattaagtattgttttttcattattttctcaacaagttctcaataccccaatagatgatagaatatcacccaatgcgtccatgttgtctatttccaacaggtcgctatatccaccaatagaagttttcccaaaaaagattctaggaacagttctaccaccagtaatttgttcaaaataatcccgcaattcattttcgggtttaaattctttaatatcgacaatttcatacgctcctcttttgaaactaaacttatttagaatatccagtgcatttctacaaaaaggacatgtatacttgacaaaaattgtcactttgttattggccaacctttgttgtacaaattcctcggccattttaatatttaagtgatataaaactatctcgacttatttaactctttagtcgagatatatggacgcagatagctatatgatagccaactacagaaggcaaacgctataaaaaacataattacgacgagcatatttataaatatttttattcagcattacttgatatagtaatattaggcacagtcaaacattcaaccactctcgatacattaactctctcattttctttaacaaattctgcaatatcttcgtaaaaagattcttgaaactttttagaatatctatcgactctagatgaaatagcgttcgtcaacatactatgttttgtatacataaaggcgcccattttaacagtttctagtgacaaaatgctagcgatcctaggatcctttagaatcacatagattgacgattcgtctctcttagtaactctagtaaaataatcatacaatctagtacgcgaaataatattatccttgacttgaggagatctaaacaatctagttttgagaacatcgataagttcatcgggaatgacatacatactatctttaatagaactcttttcatccagttgaatggattcgtccttaaccaactgattaatgagatcttctattttatcattttccagatgatatgtatgtccattaaagttaaattgtgtagcgcttctttttagtctagcagccaatactttaacatcactaatatcgatatacaaaggagatgatttatctatggtattaagaattcgtttttcgacatctgtcaaaaccaattcctttttgcctgtatcatccagttttccatcctttgtaaagaaattattttctactagactattaataagactgataaggattcctccataattgcacaatccaaactttttcacaaaactagactttacaagatctacaggaatgcgtacttcaggtttcttagcttgtgattttttcttttgcggacattttctagtaaccaactcatctaccatttcattgattttagcagtgaaataagctttcaatgcacgggcactgatactattgaaaacgagttgatcttcaaattccgccatttaagtttaccaaacaacttttaaatacaaatatatcaatagtagtagaataagaactataaaaaaaataataattaaccaataccaaccccaacaaccggtattattagttgatgtgactgttttctcatcacttagaacagatttaacaatttctataaagtctgtcaaatcatcttccggagaccccataaatacaccaaatatagcggcgtacaacttatccatttatacattgaatattggcttttctttatcgctatcttcatcatattcatcatcaatatcaacaagtcccagattacgagccagatcttcttctacattttcagtcattgatacacgttcactatctccagagagtccgataacgttagccaccacttctctatcaatgattagtttcttgagtgcgaatgtaatttttgtttccgttccggatctatagaaaactacaggtgtgataattgccttggccaattgtctttctcttttactgagtgattctagttcaccttctatagatctgagaatggatgattctccagccgaaacatattctaccatggctccgtttaatttgttgatgaagatggattcatccttaaatgttttctctgtaatagtttccaccgaaagactatgcaaagaatttggaatgtgttccttgtgcttaatgtttccatagacggattctagaagttgatacaacataggactagccgcggtaacttttatttttagaaagtatccatcgcttctatcttgtttagatttatttttataaagtttagtctctccttccaacataataaaagtggaagtcatttgactagataaactatcagtaagttttatagagatagacgaacaattagcgtattgagaagcatttagtgtaacgtattcgatacattttgcattagatttactaatcgattttgcatactctataacacccgcacaagtctgtagagaatcgctagatgcagtaggtcttggtgaagtttcaactctcttcttgattaccttactcatgattaaacctaaataattgtactttgtaatataatgatatatattttcactttatctcatttgagaataaaaatgtttttgtttaaccactgcatgatgtacagatttcggaatcgcaaaccaccagtggttttattttatccttgtccaatgtgaattgaatgggagcggatgcgggtttcgtacgtagatagtacattcccgtttttagaccgagactccatccgtaaaaatgcatactcgttagtttggaataactcggatctgctatatggatattcatagattgactttgatcgatgaaggctcccctgtctgcagccatttttatgatcgtcttttgtggaatttcccaaatagttttataaactcgcttaatatcttctggaaggtttgtattctgaatggatccaccatctgccataatcctattcttgatctcatcattccataattttctctcggttaaaactctaaggagatgcggattaactacttgaaattctccagacaatactctccgagtgtaaatattactggtatacggttccaccgactcattatttcccaaaatttgagcagttgatgcagtcggcataggtgccaccaataaactatttctaagaccgtatgttctgattttatcttttagaggttcccaattccaaagatccgacggtacaacattccaaagatcatattgtagaataccgttactggcgtacgatcctacatatgtatcgtatggtccttccttctcagctagttcacaactcgcctctaatgcaccgtaataaatggtttcgaagatcttcttatttagatcttgtgcttccaggctatcaaatggataatttaagagaataaacgcgtccgctaatccttgaacaccaataccgataggtctatgtctcttattagagatttcagcttctggaataggataataattaatatctataattttattgagatttctgacaattactttgaccacatccttcagtttgagaaaatcaaatcgcccatctattacaaacatgttcaaggcaacagatgccagattacaaacggctacctacaaaaattacgccataactccaggccgtttgtttcctccctgatctatgtatctagcggtgttattataaactctcaacattggaataataccgtttgatataccattggtaccggagatatagcttccactggcacgaatattactaattgatagacctattccccctgccattttagagattaatgcgcatcgttttaacgtgtcatagataccctctatgctatcatcgatcatgttaagtagaaaacagctagacatttggtgacgactagttcccgcattaaataaggtaggagaagcgtgcgtaaaccatttttcagaaagtagattgtacgtctcgatagctgagtctatatcccattgatgaattcctactgcgacacgcattaacatgtgctgaggtctttcaacgatcttgttgtttattttcaacaagtaggatttttccaaagttttaaaaccaaaatagttgtatgaaaagtctcgttcgtaaataataaccgagttgagtttatccttatatttgttaactatatccatggtgatacttgaaataatcggagaatgtttcccatttttaggattaacatagttgaataaatcctccatcacttcactaaatagtttttttgtttccttgtgtagatttgatacggctattctggcggctagaatggcataatccggatgttgtgtagtacaagtggctgctatttcggctgccagagtgtccaattctaccgttgttactccattatatattccttgaataaccttcatagctattttaataggatctatatgatccgtgtttaagccataacataattttctaatacgagacgtgattttatcaaacatgacattttccttgtatccatttcgtttaatgacaaacatttttgttggtgtaataaaaaaattatttaacttttcattaatagggatttgacgtacgtagcgtacaaaatgatcgttcctggtatatagataaagagtcctatatatttgaaaatcgttacggctcgattaaactttaatgattgcatagtgaatatatcattaggatttaactccttgactatcatggcggcgccagaaattaccatcaaaagcattaatacagttatgccgatcgcagttagaacggttatagcatccaccatttatatctaaaaattagatcaaagaatatgtgacaaagtcctagttgtatactgagaattgacgaaacaatgtttcttacatatttttttcttattagtaactgacttaatagtaggaactggaaagctagacttgattattctataagtatagatacccttccaaataatattctctttgataaaagttccagaaaatgtagaattttttaaaaagttatcttttgctattaccaagattgtgtttagacgcttattattaatatgagtaatgaaatccacaccgcctctagatatcgcttttatttccacattagatggtaaatccaatagtgaaactatctttttaggaatgtatggactcgcgtttagaggagtgaacgtcttgggcgtcggaaaggatgattcgtcaaacgaataaacaatttcacaaatggatgttaatgtattagtaggaaatttcttgacgctagtggaattgaagattctaatggatgatgttctacctatttcatccgataacatgttaatttccgacaccaacggttttaatatttcgatgatatacggtagtctctctttcggacttatatagcttattccacaatacgagtcattatatactccaaaaaacaaaataactagtataaaatctgtatcgaatgggaaaaacgaaattatcgacataggtatagaatctggaacattgaacgtattaatacttaattctttttctgtggtaagtaccgataggttattgacattgtatggttttaaatattctataacttgagacttgatagatattagtgatgaattgaaaattatttttatcaccacgtgtgtttcaggatcatcgtcgacgcccgtcaaccaaccgaatggagtaaaataaatatcattaatatatgctctagatattagtatttttatcaatcctttgattatcatcttctcgtaggcgaatgattccatgatcaagagtgatttaagaacatcctccggagtattaatgggcttagtaaacagtccatcgttgcaataataaaagttatccaagttaaaggatattatgcattcgtttaaagatatcacctcatctgacggagacaattttttggtaggttttagagactttgaagctacttgtttaacaaagttattcatcgtcgtttactattctatttaattttgtagttaatttatcacatatcacattaattgactttttggtccatttttccatacgtttatattcttttaatcctgcgttatccgtttccgttatatccagggatagatcttgcaagttaaatagaatgctcttaaataatgtcatttttttatccgctaaaaatttaaagaatgtataaacttttttcaaagatttaaaacttttaggtggagttctagtacacaatatcataaacaaactaataaacatcccgcattcagattccaacagctgattaacttccacattaatacagcctattttcgctccaaatgtacattcgaaaaatctgaataaaacatcgatgtcacaatttgtattatccaatacagaatgtttgtgattcgtgttaaaaccatcggagaaggaataaaaataaaaattattatagtggtggaattcagttggaatattgcctccggagtcataaaaggatactaaacattgttttttatcataaattacacatttccaatgagacaaataacaaaatccaaacattacaaatctagaggtagaacttttaattttgtctttaagtatatacgataagatatgtttattcataaacgcgtcaaatttttcatgaatcgctaaggagtttaagaatctcatgtcaaattgtcctatataatccacttcggatccataagcaaactgagagactaagttcttaatacttcgattgctcatccaggctcctctctcaggctctattttcatcttgacgacctttggattttcaccagtatgtattcctttacgtgataaatcatcgattttcaaatccatttgtgagaagtctatcgccttagataccttttctcgtagtcgaggtttaaagaaatacgctaacggtatactagtaggtaactcaaagacatcatatatagaatggtagcgcatctttaactcgtcagttagctctttcttttgatcgagttcgtcgctactattgggtctactcaggtgcccagactctactagttccaacatcataccgataggtatacaagacactctgccagcggttgtagatttatcatatttctctactacatatccgttacaatttgttaagaatttagatacatctatattgctacataatccagctagtgaatatatatgacataataaattggtaaatcctagttctggtattttactaattactaaatctgtatatctatccatttatcatggaaaagaatttacccgatatcttcttttttccaaactgcgttaatgtattctcttacaaatattcacaagatgaattcagtaacatgagcaaaacggaacgtgcaagtttctcattggcagtgtttccagtgataaaacatagatggcataacgcacacgttgtaaaacataaaggaatatacaaagttagtgcagaagcacgtggagaaaaagtatctcctccatcactaggaaaacctgtttacataaacctaactacgaggcaatatatatacagtgagtatgcaataagctttgaatgttatagttttctaaaatgtataacaaatacagaaatcaattcgttcgatgattatatattaagaggactattggaagcgggtaatagtttacagatattttccaattctgtgggtaaacggatagatactgtaggtgtactagggaacaagtatccgtttagtaaaattccattggcctcattaactccgaaagcacaacgagagatattttcagcgtggatttctcatagacctgtagttttaactggaggaaccggagtgggtaagacgtcacaggtacccaagttattgctttggtttaattatttatttgggggattctctactctagataaaatcactgactttcacgaaagaccagtcattctatctcttcctaggatagctttagttagattgcatagcaataccattttaaaatcattgggatttaaggtactaaatggatctcctatttctttacggtacggatctataccggaagaattaataaacaaacaaccaaaaaaatatggaattgtattttctacccataagttatctctaacaaaactatttagttatggcactcttattatagacgaagttcatgagcatgatcaaataggagatattattatagcagtagcgagaaagcatcatacgaaaatagattctatgtttttaatgactgccacattagaggatgacagagaacgtctaaaagtatttttacccaatcccgcatttatacatattcctggagatacactgtttaaaattagcgaggtatttattcataataagataaatccatcttccagaatggcatacatagaagaagaaaagagaaatttagttactgctatacagatgtatactcctcctgatggatcatccggcatagtcttcgtggcatccgttgctcaatgtcatgaatataaatcatatttagaaaagagattgccgtacgatatgtatattattcatggtaaggtcttagatatagacgaaatattagagaaagtgtattcatcacctaacgtatcgataattatttctactccttatttggaatccagcgttactatacgcaatgttacacacatttatgatatgggtagagtttttgttcctgctccttttggaggatcgcaacaatttatttctaaatctatgagagatcaacgaaaaggaagagtaggaagagttaatcctgggacatacgtctatttctatgatctgtcatacatgaagtctatacagcgaatagattcagaatttctacataattatatattatacgctaataagtttaatctaacactccccgaagatttgtttataattcctacaaatttggatgttctgtggcgtacaaaggaatatatagactcgttcgatattagtacagaaacatggaataaattattatccaattattatatgaagataatagagtatgcgaaactttatgtactaagtcctattctcgctgaggagttggataactttgagagaactggagaattaactagtacggtaaaagaagccattttatctctaaatttacgaattaagattttaaattttaaacataaagatgaggatacgtatatacacttttgtagagtattatttggtgtctataacggaacaaacgctactatatattatcatcgccctctaactggatatatgaatatgatttcagatactatatttgttcctgtagataataactaaaaatcaaactctaattaccacatctttttttagagatgaaaaattttccacatctccttttgtagacacgactaaacattttgcagaaaaacgtttattattatttagataatcgtatacttcatcagtgtagatagtaaatgtgaacagataaaaggtattcttgctcaataaattggtaaattccatagaatatattaatcctttcttcttgagatcccacatcatttcaaccaaagacgttttatccaatgatttacctcgtactataccacatacaaaactagattttgcagtgacgtcgtacctggtattcctaccaaacaaaattttacttttagttcttttagaaaattctaaggtagaatctctatttgccaatatgtcatctatggaattaccactagcaaaaaatgatagaaatatatattgatacatcgcagctggttttgatctactatactttaaaaacgaatcagattccataatggcctgtatatcatccgccgaaaaactatgttttacacgtattccttcggcatttctttttaatgatatatcttgtttagataatgataaagttatcatgtccatgagagacgcgtctccgtatcgtataaatatttcattagatgttagacgcttcattaggggtatacttctataaggtttcttaatcagtccatcattggttgcgtcaagaactactatcggatgttgttgggtatctctagtgttacacatggccttactaaagtttgggtaaataactatgatatctctattaattatagatgcatatatttcattcgtcaaggatattagtatcgacttgctatcgtcattaatacgtgtaatgtaatcatataaatcatgtgatagccaaggaaaattcaaatagatgttcatcatataatcgtcgctataattcatattaatactttgacattgactaatttgtaatatagcctcgccacgaagaaagctctcgtattcagtttcatcgataaaggataccgttaaatataactggttgccgatagtctcatagtctattaagtggtaagtttcgtacaaatacagaatccctaaaatattatctaatgttggattaatctttaccataactgtataaaatggagacggagtcataactattttaccgtttgtacttactggaatatatgaaggaataatctccgggcatgctggtaaagacccaaatgtctgtttgaagaaatccaatgttccaggtcctaatctcttgacaaaaattacgatattcgatcccgatatcctttgcattctatttaccagcatatcacgaactatattaagattatctatcatgtctattctcccaccgttatataaatcgcctccgctaagaaacgttagtatatccatacaatggaatacctcatttctaaaatagtattcgttttctaattctttaatgtgaaatcgtatactagaaagggaaaaattatctttgagttttccgttagaaaagaaccacgaaactaatgttctgattgcgtctgactccgtcgctgaattaatggatttacaccaaaaactcatataacttctagatgtagaagcattcgctaaaaaattagtagaatcaaaggatataagtagatgttccaacaagtgagcaattcccaagatttcatctatatcattctcgaatccgaaattagaaattcccaagtagatatcctttttcatccgatcattgatgaaaatacgaactttattcggtaagacgatcatttactaaggagtaaaataggaagtaatgttcgtatatcgttatcgtcgtataaattaaaggtgtgttttttgccattaagtgacattataattttaccaatattggaattataatataggtgtatttgagcactagaaacggtcgatgcatcggtaaatatagctgtatctaatgttctagtcggtatttcatcatttcgctgtctaataatagcgttttctctatctgtttccagcacagctgcctgaagtttattggtaggataatatgtaaaataataagaaatacatacgaataacaaaaataaaataagatataataaagatgccatttagagatctaattttgttcaacttgtccaaattcctacttacagaagatgaggaatcgttggagatagtatcttccttatgtagaggatttgaaatatcttacgatgacttaatatcgtactttccagataggaaataccataaatatatttctaaggtatttgaacatgtagatttatcggaggaattaagtatggaattccatgatacaactctgagagatttagtctatcttagattgtacaagtattccaagtatatacggccgtgttataaattaggagataatctaaaaggtatagttgttataaaggacagaaatatatatattagagaagcaaatgatgacttgatagaatatctcctcaaggaatacactcctcagatttatacatattctaatgagcgcgtccccatagctggttcaaaattaattctttgcggattttctcaagttacatttatggcgtatacaacgtcgcatataacaacaaataaaaaggtagatgttctcgtttccaaaaaatgtatagatgaactagtcgatccaataaattatcaaatacttcaaaatttatttgataaaggaagtggaacaataaacaaaatactcaggaagatattttattcggtaacaggtggccaaactccataggtagctttttctatttcggattttagaatttccaaattcaccagcgatttatcggttttggtgaaatccaaggatttattaatgtccacaaatgccatttgttttgtctgtggattgtatttgaaaatggaaacgatgtagttagatagatgcgctgcaaagtttcctattagggttccgcgctttacgtcacccaacatacttgaagcaccatcctttaaaaaaaatgataagatatcaacatggagtatatcatactcggattttaattcttctactgcctcactgacattttcacaaatactacaatacggtttaccgaaaataatcagtacgttcttcatttatgggtatcaaaaacttaaaatcgttactgctggaaaataaatcactgacgatattagatgataatttatacaaagtatacaatggaatatttgtggatacaatgagtatttatatagccgtcgccaattgtgtcagaaacttagaagagttaactactgtattcataaaatacgtaaacggatgggtaaaaaagggagggcatgtaaccctttttatcgatagaggaagtataaaaattaaacaagacgttagagacaagagacgtaaatattctaaattaaccaaggacagaaaaatgctagaattagaaaagtatacatcagaaatacaaaatgttaccggatttatggaagaagaaataaaggcagaaatgcaattaaaaatcgataaactcacatttcaaatatatttatctgattctgataacataaaaatatcattgaatgagatactaacacatttcaacaataatgagaatgttacattattttattgtgatgaacgagacgcagaattcgttatgtgtctcgaggctaaaacacatttctctaccacaggagaatggccgttgataataagtaccgatcaggatactatgctattcgcgtctgctgataatcatcccaagatgataaaaaacttaactcatctgtttaaatttgttccctcggcagaggataactatttagcaaaattaacggcgttagtgaatggatgtgatttctttcctggactctatggggcatctataacacccaccaacttaaacaaaatacaattgtttagcgattttacaatcgataatatagtcactagtttggcaattaaaaattattatagaaagactaactctaccgtagacgtgcgtaatattgttacgtttataaatgattacgctaatttagacgatgtctactcgtatgttcctccttgtcaatgcactgttcaagaatttatattctccgcattagatgaaaaatggaacgattttaaatcatcttatttagagagcgtgccattaccctgtcaattaatgtacgcgttagaaccacgtaaggagattgatgtttcagaagttaaaactttatcatcttatatagatttcgaaaatactaaattagatatcgatgttataaaatctatatcctcgatttttggatattctaacgaaaactgtaacacgatagtgttcggcatctataaggataatttactactgagtataaatagttcattttactttaacgatagtctgttaataaccaatactaaaagtgataatataataaatataggttactagattaaaaatggtgttccaactcgtctgctctacatgtggcaaagatatttctcatgaacgatataaattgattatacgaaaaaaatcattaaaggatgtactagtcagtgtaaagaacgaatgttgtaggttaaaattatctacacaaatagaacctcaacgtaacttaacagtgcaacctctattggatataaactaatatggatatggatccggttaattttatcaagacatatgcgcctagaggttctattatttttattaattatgccatatcattaactagtcatttgaatccatcgatagaaaaacatgtgggtatttattatggtacgttattatcggaacacctggtagttgaatcgacctatagaaaaggagttagaatagtcccattggatagtttttttgaaggatatattagtgcaaaagtatacatgttagagaatattcaagttatgaaaatagcagctgatacgtcattaactttactgggtattccatatggattcggtcatgatagaatgtattgttttaaattggtagctgaatgttataaaaatgccggtgttgatatatcgtctacacgaatattgggcaaagatatttttttgagccaaaacttcacagatgataatagatggataaagatatatgattctaataatttaacactttggcaaattgattaccttaaagggtgagttaatatgcataactactcctccgttattttttccctcgttctttttcttaacgttgtttgccatcactctcataatgtaaagatattctaaaatggtaaacttttgcatatcggacgcagaaattggtataaatgatgtaattgtattatttcccgtcaatggactagtcacggctccatcagttttatatcctttagagtatttctcactagtgtctagcattctagagcattccatgatctgtttatcgttgatattggccggaaagatagattttttattttttattatattactattggcaattgtagatataacttctggtaaatatttttctaccttttcaatctcttctattttcaagccggctatatattctgctatattgttgctagtatcaataccttttctggctaagaagtcatatgtggtattcactatatcagttttaactggtagttccattagcctttccacttctgcagaataatcagaaattggttctttaccagaaaatccagctactataataggctcaccgatgatcattggcaaaatcctatattgtaccagattaatgagagcatatttcatttccaataattctgctagttcttgagacattgatttatttgaggaatctagttggttctctagatactctaccatttctgccgcatacaataacttgttagataaaatcaatgttatcaaagtgtttaacgtggctagaatagtgggtttgcacgtattaaagaatgcggtagtatgcgtaaaccgttttaacgaattatatagtctccagaaatctgtggcgttacatacgtgagccgaatgacatcgaagattgtccaatatttttaatagctgctctttgtccattatttctatatttgactcgcaacaattgtagataccattaatcaccgattcttttttcgatgccggacaatagcacaattgtttagctttggactctatgtattcagaattaatagatatatctctcaatacagattgcactatacattttgaaactatgtcaaaaattgtagaacgacgctgttctgcagccatttaactttaaataatttacaaaaatttaaaatgagcatccgtataaaaatcgataaactgcgccaaattgtggcatatttttcagagttcagtgaagaagtgtctataaatgtagactcgacggatgagttaatgtatatttttgccgccttgggcggatctgtaaacatttgggctattatacctctcagtgcatcagtgttctaccgtggagccgaaaacattgtgtttaatcttccggtgtccaaggtaaaatcgtgtttgtgtagttttcacaatgatgccatcatagatatagaacccgatctggaaaataatctagtaaaactttccagttatcatgtagtaagtgtcgattgtaataaggaactgatgcctattaggacagatactactatttgtctaagtatagatcaaaagaaatcttacgtgtttaattttcacaagtatgaagaaaaatgttgtggtagaaccgtcattcatctagaatggttgttgggctttatcaagtgtattagtcagcatcagcatttggctattatgtttaaagatgacaatattattatgaggactcctggtaatactgatgcattttccagggaatattctatgactgaatgttctcaagaacttcaaaagttttctttcaaaatagctatctcgtctctcaacaaactacgaggattcaaaaagagagtcaatgtttttgaaactagaatcgtaatggataatgacgataacattctaggaatgttgttttctgacagagttcaatcctttaagattaacatctttatggcgtttttagactaatactttcaacgagataaatatgggtggtggagtaagcgttgcgctccctaaacgggatccgcctccgggagtacccactgacgaaatgttattaaacgtggataaaatgcatgacgtgatagctcctgctaagcttttagaatatgtgcatataggaccgctagcaaaagataaagaggataaagtaaagaaaagatatccagagtttagattagtcagcacaggacccggtaatctttcggcattattaagacaatcgtataatggaaccgcacccaattgctgtcgcacttttaaccgtactcattattggaagaaggatggaaagatatccgataagtatgaagatggtgcagtattagaatcgtgttggcccgacgtccacgacactggaaaatgcgatgttgatttattcgactggtgtcagggggatacgttcgatagaaacatatgccatcaatggatcggttcagcatttaataggagtgatagaacggcagagggtcaacaatcgttaataaatctgtacaataagatgcaaacattatgtactaaagatgctagtgtgccaatatgtgaatcatttttgcatcatttacgcgcacacaatacagaagatagccaagagatgatcgactatattttaagacaacagtccgcagattttaagcagaaatatatgagatgtagttatcccaccagagataagttagaagagtcactaaaatatgcggaacctcgagaatgttgggatccagagtgttcgaatgccaatgttaatttcttgctaacacgtaattataataatttagggctatgcaatattgtacgatgtaataccagcgtgaacaacttacagatggataaaacttcctcattaagattatcctgtggattaagcaatagtgatagattttctactgttcccgtcaatagagcaaaagtagttcaacataatattaaacattcgttcgacctaaaattgcatttgatcagtttattatctctcttggtaatatggatactaattgtagctatttaaatgggcgccgcggcaagcatacaaacgacggtgaatacactcagcgaacgtatctcgtctaaattagaacaagaagcgaacgctagtgctcaaacaaaatgtgatatagaaattggaaatttttatatccgacaaaaccatggatgtaacctcactgttaaaaatatgtgctccgcggacgcggatgctcagttggatgctgtgttatcagccgctacagaaacatatagtagtttaacaccggaacaaaaagcatacgtacctgctatgtttactgccgcgttaaacattcaaacgagtgtaaacactgttgttagagattttgaaaattatgtgaagcagacttgtaattctagcgcggtcgtcgataacaaattaaagatacaaaacgtaattatagatgaatgttatggagccccaggatcaccaacaaatttggaatttattaatacaggatctagcaaaggaaattgtgccattaaggcgttgatgcaattgacgactaaggccactactcaaatagcacctagacaagttgctggttcaggagttcaattttatatgatagttatcggtgttataatattggcagcgttgtttatgtactatgccaagcgtatgctattcacatccaccaatgataaaatcaaacttattttagcaaataaggaaaacgtccattggactacttacatggacacattctttagaacttctccgatggttatcgctaccacggatatacaaaactgaaaatatattgataatattttaatagattaacatggaagttatcgctgatcgtctagacgatatagtggaacaaaatatagcggatgaaaaatttgtagattttgttatacacggtctactagaacatcaatgtccctccatacttcggccattacttaggttgttgattgatatactattatttgttatagtaatttatatttttacggtacgtctggtacgtagaaattatcaaatgttgttggtgttggtggcgctagtcatcgcgttaactattttttattactttatactataatagtactagactgacttctaacaaacatctcacctgccataaataaattcttgatattaaagtcttctatttctaacactattccatctgtggaaaataatactctgacattatcgctaattgacacatcggtgagtgatatgcctataaagtaataatcttctttgggcacatataccagtgtaccaggttctaacaacctatttactggtgctccagtagcatactttttctttaccttaagaatatccatcgtttgcttagtcaatagcgataggtgattttttatcaaccactcgaaaaagtaattggagtgttcatatcctctacgggctattgtctcatgtccgtgtatgaaatttaagtaacacgactgtggtagatttgttctatagagccggttgccgcaaatagatagaactaccaatacatctgtacaaatgttaaacattaattgattaacagaaaaaacaatgttcgttctgggaatagaaaccagatcaaaacaaaattcgttagaatatatgccacgtttatacattgaatataaaataactacagtttgaaaaataacagtatcatttaaacatttaacttgcggggttaatctcacaactttactgtttttgaactgttcaaaatatagcatagatccatgagaaatacgtttagccgcctttaatagaggaaatcccaccgcctttctggatctcaccaacgacgatagttctgaccagcaactcatttcttcatcatccacctgttttaacatataataggcaggagatagatatccgtcattgcaatattccttctcgtaggcacacaatctaatattgataaaatctccattctcttctctgcatttattatcttgtttcggtggctgattaggctgtagtcttggtttaggctttggtatatcgttgttgaatctattttggtcattaaatctttcatttcttcctggtatatttttatcacctcgtttggttggatttttgtctatattatcgtttgtaacatcggtacgggtattcatttatcacaaaaaaaacttctctaaatgagtctactgctagaaaaccttatcgaagaagataccatattttttgcaggaagtatatctgagtatgatgatttacaaatggttattgccggcgcaaaatccaaatttccaagatctatgctttctatttttaatatagtacctagaacgatgtcaaaatatgagttggagttgattcataacgaaaatatcacaggagcaatgtttaccacaatgtataatataagaaacaatttgggtctaggagatgataaactaactattgaagccattgaaaactatttcttggatcctaacaatgaggttatgcctcttatcattaataatacggatatgactgccgtcattcctaaaaaaagtggtaggagaaagaataagaacatggttattttccgtcaaggatcatcacctatcttgtgtattttcgaaactcgtaaaaagattaatatttataaagaaaatatggaatccgcgtcgactgagtatacacctatcggagacaacaaggctttgatatctaaatatgcgggaattaatgtcctgaatgtgtattctccttccacatccatgagattgaatgccatttacggattcaccaataaaaataaactagagaaacttagtactaataaggaactagaatcgtatagttctagccctcttcaagaacccattaggttaaatgattttctgggactattggaatgtgttaaaaagaatattcctctaacagatattccgacaaaggattgattactataaatggagaatgttcctaatgtatactttaatcctgtgtttatagagcccacgtttaaacattctttattaagtgtttataaacacagattaatagttttatttgaagtattcgttgtattcattctaatatatgtattttttagatctgaattaaatatgttcttcatgcctaaacgaaaaatacccgatcctattgatagattacgacgtgctaatctagcgtgtgaagacgataaattaatgatctatggattaccatggatgacaactcaaacatctgcgttatcaataaatagtaaaccgatagtgtataaagattgtgcaaagcttttgcgatcaataaatggatcacaaccagtatctcttaacgatgttcttcgcagatgatgattcattttttaagtatttggctagtcaagatgatgaatcttcattatctgatatattgcaaatcactcaatatctagactttctgttattattattgatccaatcaaaaaataaattagaagccgtgggtcattgttatgaatctctttcagaggaatacagacaattgacaaaattcacagactctcaagattttaaaaaactgtttaacaaggtccctattgttacagatggaagggtcaaacttaataaaggatatttgttcgactttgtgattagtttgatgcgattcaaaaaagaatcctctctagctaccaccgcaatagatcctattagatacatagatcctcgtcgcgatatcgcattttctaacgtgatggatatattaaagtcgaataaagtgaacaataattaattctttattgtcatccgcgcgtcgaccctagcctcgaggcggccgcctattatattttttatctaaaaaactaaaaataaacattgattaaattttaatataatacttaaaaatggatgttgtgtcgttagataaaccgtttatgtattttgaggaaattgataatgagttagattacgaaccagaaagtgcaaatgaggtcgcaaaaaaactaccgtatcaaggacagttaaaactattactaggagaattattttttcttagtaagttacagcgacacggtatattagatggtgccaccgtagtgtatataggatctgctcccggtacacatatacgttatttgagagatcatttctataatttaggagtgatcatcaaatggatgctaattgacggccgccatcatgatcctattttaaatggattgcgtgatgtgactctagtgactcggttcgttgatgaggaatatctacgatccatcaaaaaacaactgcatccttctaagattattttaatttctgatgtgagatccaaacgaggaggaaatgaacctagtacggcggatttactaagtaattacgctctacaaaatgtcatgattagtattttaaaccccgtggcatctagtcttaaatggagatgcccgtttccagatcaatggatcaaggacttttatatcccacacggtaataaaatgttacaaccttttgctccttcatattcagctgaaatgagattattaagtatttataccggtgagaacatgagactgactcgagttaccaaattagacgctgtaaattatgaaaaaaagatgtactaccttaataagatcgtccgtaacaaagtagttgttaactttgattatcctaatcaggaatatgactattttcacatgtactttatgctgaggaccgtgtactgcaataaaacatttcctactactaaagcaaaggtactatttctacaacaatctatatttcgtttcttaaatattccaacaacatcaactgaaaaagttagtcatgaaccaatacaacgtaaagtatctagcaaagattttatgtctaaaaacagaaatagcaagagatccgtacgcagtaataaatagaaacgtactactgagatatactaccgatatagagtataatgatttagttactttaataaccgttagacataaaattgattctatgaaaactgtgtttcaggtatttaacgaatcatctataaattatactccggttgatgatgattatggagaaccaatcattataacatcgtatcttcaaaaaggtcataacaagtttcctgtaaattttctatacatagatgtggtaatatctgacttatttcctagctttgttagactagatactacagaaactaatatagttaatagtgtactacaaacaggcgatggtaaaaagactcttcgtcttcccaaaatgttagagacggaaatagttgtcaagattctctatcgtcctaatataccattaaaaattgttagatttttccgcaataacatggtaactggagtagagatagcagatagatctgttatttcagtcgctgattaatcaattaatagagatgagataagaacattataataatcaataatatatcttatatcttgtttagaaaaatgccaatattaaaatagctaacgctagtaatccaatcggaagccatttgatatctataatagggtatctaatttcctgattcagatagcggacagctatattctcggtagctactcgtttggaatcacaaacattatttacatctaatttactatctgtaatggaaacgtttcccaatgaaatggtacaatccgatacattgcatcttgatatatttttttttaaagaggctggtaacaacgcatcgcttcgtttacatggctcgtaccaacaataatagggtaatcttgtatctattcctatccgtactatgcttttatcaggatgaatacatttacatcgtatatcgtctttgttagcatcgcagaatgcataaatttgctcgtccgtcatgataaaaatttaaagtgtaaatataactattatttttatagttgtaataaaaagggaaatttgattgtataccttcggttctttaaaagaaactgacttgataaaaatggctgtaatctctaaggttacgtatagtctatatgatcaaaaagagattaatgctacagatattatcattagtcatgttaaaaatgacgacgatatcggtaccgttaaagatggtagactaggtgctatggatggggcattatgtaaaacttgtgggaaaacggaattggaatgtttcggtcactggggtaaagtaagtatttataaaactcatatagttaagcctgaatttatttcagaaattattcgtttactgaattatatatgtattcactgcggattattgcgttcacgagaaccgtattccgacgatattaacctaaaagagttatcgggacacgctcttaggagattaaaggataaaatattatccaagaaaaagtcatgttggaacagtgaatgtatgcaaccgtatcaaaaaattactttttcaaagaaaaaggtttgtttcgtcaacaagttggatgatattaacgttcctaattctctcatctatcaaaagttaatttctattcatgaaaagttttggccattattagaaattcatcaatatccagctaacttattttatacagactactttcccatccctccgttgattattagaccggctattagtttttggatagatagtatacccaaagaaaccaatgaattaacttacttattaggtatgatcgttaagaattgtaacttgaatgctgatgaacaggttatccagaaggcggtaatagaatacgatgatattaaaattatttctaataacactaccagtatcaatttatcatatatcacatccggcaaaaataatatgattagaagttatatcgtcgcccggcgaaaagatcagaccgctagatctgtaattggtcccagtacatctatcaccgttaatgaggtaggaatgcccgcatatattagaaatacacttacagaaaagatatttgttaatgcctttacagtggataaagttaaacaactattagcatcaaaccaagttaaattttactttaataaacgattaaaccaattaacaagaatacgccaaggaaagtttatcaaaaataaaatacatttattgcctggtgattgggtagaagtagctgttcaagaatatacaagtattatttttggaagacagccgtctctacatagatacaacgtcatcgcttcatctatcagagctaccgaaggagatactatcaaaatatctcccggaattgccaactctcaaaatgctgatttcgacggggatgaggaatggatgatattagaacaaaatcctaaagctgtaattgaacaaagtattcttatgtatccgacgacgttactcaaacacgatattcatggagcccctgtttatggatctattcaagatgaaatcgtagcagcgtattcattgtttaggatacaagatctttgtttagatgaagtattgaacatcttggggaaatatggaagagagttcgatcctaaaggtaaatgtaaattcagcggtaaagatatctatacttacttgataggtgaaaagattaattatccgggtctcttaaaggatggtgaaattattgcaaacgacgtagatagtaattttgttgtggctatgaggcatctgtcattggctggactcttatccgatcataagtcgaacgtggaaggtatcaactttattatcaagtcatcttatgtttttaagagatatctatctatttacggttttggggtgacattcaaagatctgagaccaaattcgacgttcactaataaattggaggccatcaacgtagaaaaaatagaacttatcaaagaagcatacgccaaatatctcaaagatgtaagagacgggaaaatagttccattatctaaagctttagaggcggactacgtggaatccatgttatccaacttgacaaatcttaatatccgagagatagaagaacatatgagacaaacgctgatagatgatccagataataacctcctgaaaatggccaaagcgggttataaagtaaatcccacagaactaatgtatattctaggtacttatggacaacagaggattgatggtgaaccagcagagactcgagtattgggtagagtcttaccttactatcttccagactctaaggatccagaaggaagaggttatattcttaattctttaacaaaaggattaacaggttctcaatattacttttcgatgctggttgcaagatctcaatctactgatatcgtctgtgaaacatcacgtaccggaacactggctagaaaaatcattaaaaagatggaggatatggtggtcgacggatacggacaagtagttataggtaatacgctcatcaagtacgccgccaattataccaaaattctaggctcagtatgtaaacctgtagatcttatctatccagatgagtccatgacttggtatttggaaattagtgctctgtggaataaaataaaacagggattcgtttactctcagaaacagaaacttgcaaaaaagacattggcgccgtttaatttcctagtattcgtcaaacccaccactgaggataatgctattaaggttaaggatctgtacgatatgattcataacgtcattgatgatgtgagagagaaatacttctttacggtatctaatatagattttatggagtatatattcttgacgcatcttaatccttctagaattagaattacaaaagaaacggctatcactatctttgaaaagttctatgaaaaactcaattatactctaggtggtggaactcctattggaattatttctgcacaggtattgtctgagaagtttacacaacaagccctgtccagttttcacactactgaaaaaagtggtgccgtcaaacaaaaacttggtttcaacgagtttaataacttgactaatttgagtaagaataagaccgaaattatcactctggtatccgatgatatctctaaacttcaatctgttaagattaatttcgaatttgtatgtttgggagaattaaatccaaacatcactcttcgaaaagaaacagataaatatgtagtagatataatagttaatagattatacatcaagagagcagaaataaccgaattagttgtcgaatatatgattgaacgatttatctcctttagcgtcattgtaaaggaatggggtatggagacattcattgaggacgaggataatattagatttactgtctatctaaatttcgttgaaccagaggaattgaatcttagtaagtttatgatggttcttccgggggcagccaacaagggaaagattagtaaattcaagattcctatctctgactatacgggatatgacgacttcaatcaaacaaaaaagctcaataagatgactgtagaactcatgaatctaaaagaattaggttctttcgatttggaaaacgtcaacgtgtatcctggagtatggaatacatacgatatcttcggtatcgaggccgctcgtgaatacttgtgcgaagccatgttaaacacctatggagaagggttcgattatctgtatcagccttgtgatcttctcgctagtttactatgtgctagttacgaaccagaatcagtgaataaattcaagttcggcgcagctagtactcttaagagagctacgttcggagacaataaagcattgttaaacgcggctcttcataaaaagtcagaacctattaacgataatagtagctgccacttttttagcaaggtccctaatataggaactggatattacaaatactttatcgacttgggtcttctcatgagaatggaaaggaaactatctgataagatatcttctcaaaagatcaaggaaatggaagaaacagaagacttttaattcttatcaataacatatttttctatgatctgtcttttaaacgatggattttccacaaatgcgcctctcaagtccctcatagaatgatacacgtataaaaaatatagcataggcaatgactccttatttttagacattagatatgccaaaatcatagccccgcttctatttactcccgcagcacaatgaaccaacacgggctcgtttcgttgatcacatttagataaaaaggcggttacgtcgtcaaaatatttactaatatcggtagttgtatcatctaccaacggtatatgaataatattaatattagagttaggtaatgtatatttatccatcgtcaaatttaaaacatatttgaacttaacttcagatgatggtgcatccatagcatttttataatttcccaaatacacattattggttacccttgtcattatagtgggagatttggctctgtgcatatctccagttgaacgtagtagtaagtatttatacaaacttttcttatccatttataacgtacaaatggataaaactactttatcggtaaacgcgtgtaatttagaatacgttagagaaaaggctatagtaggcgtacaagcagccaaaacatcaacacttatattctttgttattatattggcaattagtgcgctattactctggtttcagacgtctgataatccagtctttaatgaattaacgagatatatgcgaattaaaaatacggttaacgattggaaatcattaacggatagcaaaacaaaattagaaagtgatagaggtagacttctagccgctggtaaggatgatatattcgaattcaaatgtgtggatttcggcgcctattttatagctatgcgattggataagaaaacatatctgccgcaagctattaggcgaggtactggagacgcgtggatggttaaaaaggcggcaaaggtcgatccatctgctcaacaattttgtcagtatttgataaaacacaagtctaataatgttattacttgtggtaatgagatgttaaatgaattaggttatagcggttattttatgtcaccgcattggtgttccgattttagtaatatggaatagtgttagataaatgcggtaacgaatgttcctgtaaggaaccataacagcttagatttaacgttaaagatgagcataaacataataaacaaaattacaatcaaacctataacattaatatcaaacaatccaaaaaatgaaatcagtggagtagtaaacgcgtacataactcctggataacgtttagcagctgccgttcctattctagaccaaaaattcggtttcatgttttcgaagcggtgttctgcaacaagtcggggatcgtgttctacatatttggcggcgttatccagtatctgcctattgatcttcatttcgttttcgattctggctatttcaaaataaaatcccgatgatagacctccagactttataatttcatctacaatgttcagcgccgtagtaactctaataatataggctgataagctaacatcataccctcctgtatatgtgaatatggcatgatttttgtccattacaagctcggttttaactttattgcctgtaataatttctctcatctgtaggatatctatttttttgtcatgcattgccttcaagacgggacgaagaaacgtaatatcctcaataacgttatcgttttctacaataactacatattctacctttttattttctaactcggtaaaaaaattagaatcccatagggctaaatgtctagcgatatttcttttcgtttcctctgtacacatagtgttacaaaaccctgaaaagaagtgagtatacttgtcatcatttctaatgtttcctccagtccactgtataaacgcataatccttgtaatgatctggatcatccttgactaccacaacatctcttttttctggcataacttcgttgtcctttacatcatcgaacttctgatcattaatatgctcatgaacattaggaaatgtttctgatggaggtctatcaataactggcacaacaataacaggagttttcaccgccgccatttagttattgaaattaatcatatacaactctttaatacgagttatattttcgtctatccattgtttcacatttacatatttcgacaaaaagatataaaatgcgtattccaatgcttctctgtttaatgaattactaaaatatacaaacacgtcactgtctggcaataaatgatatcttagaatattgtaacaatttattttgtattgcacatgttcgtgatctatgagttcttcttcgaatggcataggatctccgaatctgaaaacgtataaataggagttagaataataatatttgagagtattggtaatatataaactctttagcggtataattagtttttttctctcaatttctatttttagatgtgatggaaaaatgactaattttgtagcattagtatcatgaactctaatcaaaatcttaatatcttcgtcacacgttagctctttgaagtttttaagagatgcatcagttggttctacagatggagtaggtgcaacaattttttgttctacacatgtatgtactggagccattgttttaactataatggtgcttgtatcgaaaaactttaatgcagatagcggaagctcttcgccgcgactttctacatcgtaattgggttctaacgccgatctctgaatggatactagttttctaagttctaatgtgattctctgaaaatgtaaatccaattcctccggcattatagatgtgtatacatcggtaaataaaactatagtatccaacgatcccttctcgcaaattctagtcttaaccaaaaaatcgtatataaccacggagatggcgtatttaagagtggattcttctaccgttttgttcttggatttcatataagaaactataaagtccgcactactgttaagaatgattactaacgcaactatatagtttaaattaagcatcttggaaacataaaataactctgtagacgatacttgactttcgaataagtttgcagacaaacgaagaaagaacagacctctcttaatttcagaagaaaactttttttcgtattcctgacgtctagagtttatatcaataagaaagttaagaattagtcggttaatgttgtatttcattacccaagtttgagatttcataatattatcaaaagacatgataatattaaagataaagcgctgactatgaacgaaatagctatatggttcgctcaaaaatatagtcttgttaaacgtggaaacgataactgtatttttaatcacgtcagcggcatctaaattaaatataggtatatttattccacacactctacaatatgccacaccatcttcataataaataaattcgttagcaaagttattaattttagtgaaatagttagcgtcaactttcatagcttccttcaatctaatttgatgctcacacggtgcgaattccactctaacatcccttttccatgcctcaggttcatcgatctctataatatctagttttttgcgtttcacaaacacaggctcgtctctcgcgatgagatctgtatagtaactatgtaaatgataactagatagaaagatgtagctatatagatgacgatcctttaagagaggtataataactttaccccaatcagatagactgttgttatggtcttcggaaaaagaatttttataaatttttccagtattttccaaatatacgtacttgacatctaaaaaatccttaatgataataggaatggataatccgtctattttataaagaaatacatatcgcacattatacttttttttggaaatgggaataccgatgtgtctacataaatatgcaaagtctaaatattttttagagaatcttaattggtccaaattcttttccaagtacggtaatagatttttcatattgaacggtatcttcttaatctctggttctagttccgcattaaatgatgaaactaagtcactatttttataactaacgattacatcacctctaacatcatcatttaccagaatactgatcttcttttgtcgtaaatacatgtctaatgtgttaaaaaaaagatcatacaagttatacgtcatttcatctgtggtattcttgtcattgaaggataaactcgtactaatctcttctttaacagcctgttcaaatttatatcctatatacgaaaaaatagcaaccagtgtttgatcatccgcgtcaatattctgttctatcgtagtgtataacaatcgtatatcttcttctgtgatagtcgatacgttataaaggttgataacgaaaatatttttatttcgtgaaataaagtcatcgtaggattttggacttatattcgcgtctagtagatatgcttttatttttggaatgatctcaattagaatagtctctttagagtccatttaaagttacaaacaactaggaaattggtttatgatgtataatttttttagtttttatagattctttattctatacttaaaaaatgaaaataaatacaaaggttcttgagggttgtgttaaattgaaagcgagaaataatcataaattatttcattatcgcgatatccgttaagtttgtatcgtaatggcgtggtcaattacaaataaagcggatactagtagcttcacaaagatggctgaaatcagagctcatctaaaaaatagcgctgaaaataaagataaaaacgaggatattttcccggaagatgtaataattccatctactaagcccaaaaccaaacgagccactactcctcgtaaaccagcggctactaaaagatcaaccaaaaaggaggaagtggaagaagaagtagttatagaggaatatcatcaaacaactgaaaaaaattctccatctcctggagtcagcgacattgtagaaagcgtggccgctgtagagctcgatgatagcgacggggatgatgaacctatggtacaagttgaagctggtaaagtaaatcatagtgctagaagcgatctttctgacctaaaggtggctaccgacaatatcgttaaagatcttaagaaaattattactagaatctctgcagtatcgacggttctagaggatgttcaagcagctggtatctctagacaatttacttctatgactaaagctattacaacactatctgatctagtcaccgagggaaaatctaaagttgttcgtaaaaaagttaaaacttgtaagaagtaaatgcgtgcacttttttataaagatggtaaactctttaccgataataattttttaaatcctgtatcagacgataatccagcgtatgaggttttgcaacatgttaaaattcctactcatttaacagatgtagtagtatatgaacaaacgtgggaggaggcgttaactagattaatttttgtgggaagcgattcaaaaggacgtagacaatacttttacggaaaaatgcatgtacagaatcgcaacgctaaaagagatcgtatttttgttagagtatataacgttatgaaacgaattaattgttttataaacaaaaatataaagaaatcgtccacagattccaattatcagttggcggtttttatgttaatggaaactatgttttttattagatttggtaaaatgaaatatcttaaggagaatgaaacagtagggttattaacactaaaaaataaacacatagaaataagtcccgatgaaatagttatcaagtttgtaggaaaggacaaagtttcacatgaatttgttgttcataagtctaatagactatataaaccgctattgaaactgacggatgattctagtcccgaagaatttctgttcaacaaactaagtgaacgaaaggtatacgaatgtatcaaacagtttggtattagaatcaaggatctccgaacgtatggagtcaattatacgtttttatataatttttggacaaatgtaaagtccatatctcctcttccatcaccaaaaaagttaatagcgttaactatcaaacaaactgctgaagtggtaggtcatactccatcaatttcaaaaagagcttacatggcaacgactattttagaaatggtaaaggataaaaattttttagatgtagtatctaaaactacgttcgatgaattcctatctatagtcgtagatcacgttaaatcatctacggatggatgatatagatctttacacaaataattacaagaccgataaatggaaatggataagcgtatgaaatctctcgcaatgaccgctttctttggggagctaagcacattagatattatggcattgataatgtctatatttaaacgccatccaaacaataccattttttcagtggataaggatggtcagtttatgattgatttcgaatacgataattataaggcttctcaatatttggatctgaccctcactccgatatttggagatgaatgcaagactcacgcatcgagtatagccgaacaattggcgtgtgcggatattattaaagaggatattagcgaatacatcaaaactactccccgtcttaaacgatttataaaaaaataccgcaatagatcagatactcgcatcagtcgagatacagaaaagcttaaaatagctctagctaaaggcatagattacgaatatataaaagacgcttgttaataagtaaatgaaaaaaaactagtcgtttataataaaacacaatatggatgccaacatagtatcatcttctactattgcaacgtatatagacgctttagcgaagaatgcttcagaattagaacagaggtctaccgcatacgaaataaataatgaattggaactagtatttattaagccgccattaattactttgacaaatgtagtgaatatctctacgattcaggaatcgtttattcgatttaccgttactaataaggaaggtgttaaaattagaactaagattccattatctaaggtacatggtctagatgtaaaaaatgtacagttagtagatgctatagataacatagtttgggaaaagaaatcattagtgacggaaaatcgtcttcacaaagaatgcttgttgagactatcgacagaggaacgtcatatatttttggattacaagaaatatggatcctctatccgactagaattagtcaatcttattcaagcaaaaacaaaaaactttacgatagactttaagctaaaatattttctaggatccggtgcccaatctaaaagttctttgttgcacgctattaatcatccaaagtcaaggcctaatacatctctggaaatagaattcacacctagagacaatgaaaaagttccatatgatgaactaataaaggaattgacgactctatcacgtcatatatttatggcttctccagagaatgtaattctttctccgcctattaacgcacctataaagacttttatgttgcctaaacaagatatagtaggtctggatctggaaaatctatatgccgtaactaagactgacggcattcctataactatcagagttacatcaaacgggttgtattgttattttacacatcttggttatattattagatatcctgttaagagaataatagattccgaagtagtagtctttggtgaggcagttaaggataagaactggaccgtatatctcattaagctaatagagcctgtgaatgcaatcaatgatagactagaagaaagtaagtatgttgaatctaaactagtggatatttgtgatcggatagtattcaagtcaaagaaatatgaaggtccgtttactacaactagtgaagtcgtcgatatgttatctacatatttaccaaagcaaccagaaggtgttattctgttctattcaaagggacctaaatctaacattgattttaaaattaaaaaggaaaatactatagaccaaactgcaaatgtagtatttaggtacatgtccagtgaaccaattatctttggagaatcgtctatctttgtagagtataagaaatttagcaacgataaaggctttcctaaagaatatggttctggtaagattgtgttatataacggcgttaattatctaaataatatctattgtttggaatatattaatacacataatgaagtgggtattaagtccgtggttgtacctattaagtttatagcagaattcttagttaatggagaaatacttaaacctagaattgataaaaccatgaaatatattaactcagaagattattatggaaatcaacataatatcatagttgaacatttaagagatcaaagcatcaaaataggagatatctttaacgaggataaactatcggatgtgggacatcaatacgccaataatgataaatttagattaaatccagaagttagttattttacgaataaacgaactagaggaccgttgggaattttatcaaactacgtcaagactcttcttatttctatgtattgttccaaaacatttttagacgattccaacaaacgaaaggtattggcgattgattttggaaacggtgcggacctggaaaaatacttttatggagagattgcgttattggtagcgacggatccggatgctgatgctatagctagaggaaatgaaagatacaacaaattaaactctggaattaaaaccaagtactacaaatttgactacattcaggaaactattcgatccgatacatttgtctctagtgtcagagaagtattctattttggaaagtttaatatcatcgactggcagtttgctatccattattcttttcatccgagacattatgctaccgtcatgaataacttatccgaactaactgcttctggaggcaaggtattaatcactaccatggacggagacaaattatcaaaattaacagataaaaagacttttataattcataagaatttacctagtagcgaaaactatatgtctgtagaaaaaatagctgatgatagaatagtggtatataatccatcaacaatgtctactccaatgactgaatacattatcaaaaagaacgatatagtcagagtgtttaacgaatacggatttgttcttgtagataacgttgatttcgctacaattatagaacgaagtaaaaagtttattaatggcgcatctacaatggaagatagaccgtctacaaaaaactttttcgaactaaatagaggagccattaaatgtgaaggtttagatgtcgaagacttacttagttactatgttgtttatgtcttttctaagcggtaaataataatatggtatgggttctgatatccccgttctaaatgcattaaataattccaatagagcgatttttgttcctataggaccttccaactgtggatactctgtattgttaatagatatattaatacttttgtcgggtaacagaggttctacgtcttctaaaaataaaagtttgataacatctggcctgttcataaataaaaacttggcgattctatatatactcttattatcaaatctagccattgtcttatagatgtgagctactgtaggtgtaccatttgattttctttctaatactatatatttctctcgaagaagttcttgcacatcatctgggaataaaatactactgttgagtaaatcagttattttttttatatcgatattgatggacatttttatagttaaggataataagtatcccaaagtcgataacgacgataacgaagtatttatacttttaggaaatcacaatgactttatcagatcaaaattaacaaaattaaaggagcatgtatttttttctgaatatattgtgactccagatacatatggatctttatgcgtcgaattaaatgggtctagttttcagcacggtggtagatatatagaggtggaggaatttatagatgctggaagacaagttagatggtgttctacatccaatcatatatctgaagatatgcacactgataaatttgtcatttatgatatttatacgtttgattcgttcaagaataaacgattggtatttgtacaggtgcctccatcattaggagatgatagctatttgactaatccgttattgtctccgtattatcgtaattcagtagccagacaaatggtcaatgatatgatttttaatcaagattcatttttaaaatatttattagaacatctgattagaagccactatagagtttctaaacatataacaatagttagatacaaggataccgaagaattaaatctaacgagaatatgttataatagagataagtttaaggcgtttgtattcgcttggtttaacggcgttttggaaaatgaaaaggtactagatacgtataaaaaggtatctaatttgatataatgaattcagtgactgtatcacacgcgccatatactattacttatcacgatgattggaaaccagtaatgagtcaattggtagagttttataacgaagtagccagttggctgctacgagacgagacgtcgcctattcctgataagttctttatacagttgaaacaaccgcttagaaataaacgagtatgtgtgtgcggtatagatccgtatccgaaagatggaactggtgtaccgttcgaatcaccaaattttacaaaaaaatcaattaaggagatagcttcatctatatctagattaaccggagtaattgattataaaggttataaccttaatataatagacggggttataccctggaattattacttaagttgtaaattaggagaaacaaaaagtcacgcgatctactgggataagatttccaagttactgctgcagcatataactaaacacgttagtgttctttattgtttgggtaaaacagatttctcgaatatacgggccaagttagaatccccggtaactaccatagtcggatatcatccagcggctagagaccgccaattcgagaaagatagatcatttgaaattatcaacgttttactggaattagacaacaaggcacctataaattgggctcaagggtttatttattaatgctttagtgaaattttaacttgtgttctaaatggatgcaactattagaggtaatgatgttatctttgttcttaagactataggtgtcccgtcagcgtgcagacaaaatgaagatccaagatttgtagaagcatttaaatgcgacgagttagaaagatatattgagaataatccagaatgtacactattcgaaagtcttagggatgaggaagcatactctatagtcagaattttcatggatgtagatttagacgcgtgtctagacgaaatagattatttaacggctattcaagattttattatcgaggtgtcaaactgtgtagctagattcgcgtttacagaatgcggtgccattcatgaaaatgtaataaaatccatgagatctaatttttcattgactaagtctacaaatagagataaaacaagttttcatattatctttttagacacgtataccactatggatacattgatagctatgaaacgaacactattagaattaagtagatcatctgaaaatccactaaccagatcgatagacactgccgtatataggagaaaaacaactcttcgggttgtaggtactaggaaaaatccaaattgcgacactattcatgtaatgcaaccaccgcatgataatatagaagattacctattcacttacgtggatatgaacaacaatagttattacttttctctacaacgacgattggaggatttagttcctgataagttatgggaaccagggtttatttcattcgaagacgctataaaaagagtttcaaaaatattcattaattctataataaactttaatgatctcgatgaaaataattttacaacggtaccactggtcatagattacgtaacaccttgtgcattatgtaaaaaacgatcgcataaacatccgcatcaactatcgttggaaaatggtgctattagaatttacaaaactggtaatccacatagttgtaaagttaaaattgttccgttggatggtaataaactgtttaatattgcacaaagaattttagacactaactctgttttattaaccgaacgaggagaccatatagtttggattaataattcatggaaatttaacagcgaagaacccttgataacaaaactaattctgtcaataagacatcaactacctaaggaatattcaagcgaattactctgtccgaggaaacgaaagactgtagaagctaacatacgagacatgttaatagattcagtggagaccgatacctatccggataaacttccgtttaaaaatggtgtattggacctggtagacggaatgttttactctggagatgatgctaaaaaatatacgtgtactgtatcaaccggatttaaatttgacgatacaaagttcgtcgaagacagtccagaaatggaagagttaatgaatatcattaacgatatccaaccattaacggatgaaaataagaaaaatagagagttgtacgaaaaaactttatctagttgtttatgcggtgctaccaaaggatgtttaacattcttttttggagaaactgcaactggaaagtcgacaaccaaacgtttgttaaagtctgctatcggtgacctgtttgttgagacgggtcaaacaattttaacagatgtattggataaaggacctaatccatttatcgctaacatgcatttgaaaagatctgtattctgtagcgaactacctgattttgcctgtagtggatcaaagaaaattagatctgacaatattaaaaagttgacagaaccttgtgtcattggaagaccgtgtttctccaataaaattaataatagaaaccatgcgacaatcattatcgatactaattacaaacctgtctttgataggatagataacgcattaatgagaagaattgccgtcgtgcgattcagaacacacttttctcaaccttctggtagagaggctgctgaaaataatgacgcgtacgataaagtcaaactattagacgaggggttagatggtaaaatacaaaataatagatatagattcgcatttctatacttgttggtgaaatggtacaaaaaatatcatgttcctattatgaaactatatcctacaccggaagagattccggactttgcattctatctcaaaataggtactctgttagtatctagctctgtaaagcatattccattaatgacggacctctccaaaaagggatatatattgtacgataatgtggttactcttccgttgactactttccaacagaaaatatccaagtattttaattctagactatttggacacgatatagagagcttcatcaatagacataagaaatttgccaatgttagtgatgaatatctgcaatatatattcatagaggatatttcatctccgtaaatatatgctcatatatttatagaagatatcacatatctaaatgaataccggaatcatagatttatttgataatcatgttgatagtataccaactatattacctcatcagttagctactctagattatctagttagaactatcatagatgagaacagaagcgtgttattgttccatattatgggatcaggtaaaacaataatcgctttgttgttcgccttggtagcttccagatttaaaaaggtttacattctagtgcctaatattaacattttgaaaattttcaattataatatgggtgtagctatgaacttgtttaatgacaaattcatagctgagaatatctttattcattccacaacaagtttttattctcttaattataacgataacgtcattaattataacggattatctcgctacaataactctatttttatcgttgatgaggcacataatatctttgggaataatactggagaacttatgaccgtgataaaaaataaaaacaagattccttttttactattgtctggatctcccattactaacacacctaatactctgggtcatattatagatttaatgtccgaagagacgatagattttggtgaaattattagtcgtggtaagaaagtaattcagacacttcttaacgaacgcggtgtgaatgtacttaaggatttgcttaaaggaagaatatcatattacgaaatgcctgataaagatctaccaacgataagatatcacggacgtaagtttctagatactagagtagtatattgtcacatgtctaaacttcaagagagagattatatgattactagacgacagctatgttatcatgaaatgtttgataaaaatatgtataacgtgtcaatggcagtattgggacaacttaatctgatgaataatttagatactttatttcaggaacaggataaggaattgtacccaaatctgaaaataaataatggcgtgttatacggagaagaattggtaacgttaaacattagttccaaatttaaatactttattaatcggatacagacactcaacggaaaacattttatatacttttctaattctacatatggcggattggtaattaaatatatcatgctcagtaatggatattctgaatataatggttctcagggaactaatccacatatgataaacggcaaaccaaaaacatttgctatcgttactagtaaaatgaaatcgtctttagaggatctattagatgtgtataattctcctgaaaacgatgatggcagtcaattgatgtttttgttttcgtcaaacattatgtccgaatcctatactctgaaagaggtaaggcatatttggtttatgactatcccagatactttttctcaatacaaccaaattcttggacgatctattagaaaattctcttacgccgatatttctgaaccagttaatgtatatcttttagccgccgtatattccgatttcaatgacgaagtgacgtcattaaacgattacacacaggatgaattgattaatgttttaccatttgacatcaaaaagctgttgtatctaaaatttaagactaaagaaacgaatagaatatactctattcttcaagagatgtctgaaacgtattctcttccaccacatccatcaattgtaaaagttttattgggagaattggtcagacaatttttttataataattctcgtattaagtataacgataccaagttacttaaaatggttacatcagttataaaaaataaagaagacgctaggaattacatagatgatattgtaaacggtcacttctttgtatcgaataaagtatttgataaatctcttttatacaaatacgaaaacgatattattacagtaccgtttagactttcctacgaaccatttgtttggggagttaactttcgtaaagaatataacgtggtatcttctccataaaactgatgagatatataaagaaataaatgtcgagctttgttaccaatggataccttccagttacattggagccacacgagctgacgttagacataaaaactaatattaggaatgccgtatataagacgtatctccatagagaaattagtggtaaaatggccaagaaaatagaaattcgtgaagacgtggaattacctctcggcgaaatagttaataattctgtagttataaacgttccgtgtgtaataacctacgcgtattatcacgttggggatatagtcagaggaacattaaacatcgaagatgaatcaaatgtaactattcaatgtggagatttaatctgtaaactaagtagagattcgggtactgtatcatttagcgattcaaagtactgcttttttcgaaatggtaatgcgtatgacaatggcagcgaagtcactgccgttctaatggaggctcaacaaggtatcgaatctagttttgtttttctcgcgaatatcgttgactcataaaaaagagaatagcggtaagtataaacacgaatactatggcaataattgcgaatgttttattcccttcgatatatttttgataatatgaaaaacatgtctctctcaaatcggacaaccatctcataaaatagttctcgcgcgctggagaggtagttgctgctcgtataatctccccagaataatatacttgcgtgtcgtcgttcaatttatacggatttctatagttctctgttatataatgcggttttccatcatgattagacgacgacaatagtgttctaaatttagatagttgatcagaatgaatgtttattggcgttggaaaaattatccatacagcgtctgcagagtggttgatagttgttcctagatatgtaaaataatccaacttactaggcagcaaattgtctagataaaatactgaatcaaacggtgcagacgtattggtggatctaatggaatccaattgattaactatcttttgaaaatatacatttttatgatccgatacttgtaagaatatagaaataatgataagtccatcatcgtgtttttttgcctcttcataagaactatattttttcttattccaatgaacaagattaatctctccagagtatttgtacacatctatcaagtgattggatccataatcgtcttcctttccccaatatatacgtagtgatgataacacatattcattggggagaaaccctccacttatatatcctcctttaaaattaatccttactagttttccagtgttctggatagtggttggtttcgactcattataatgtatgtctaacggcttcaatcgcgcgttagaaattgcttttttagtttctatattaataggagatagttgttgcggcatagtaaaaatgaaatgataactgtttaaaaatagctcttagtatgggaattacaatggatgaggaagtgatatttgaaactcctagagaattaatatctattaaacgaataaaagatattccaagatcaaaagacacgcatgtgtttgctgcgtgtataacaagtgacggatatccgttaataggagctagaagaacttcattcgcattccaagcgatattatctcaacaaaattcagattctatctttagagtatccactaaactattacggtttatgtactacaatgaactaagagaaatctttagacggttgagaaaaggttctatcaacgatatcgatcctcactttgaagagttaatattattgggtggtaaactagataaaaaggaatctattaaagattgtttaagaagagaattaaaagaggaaagtgatgaacgtataacagtaaaagaatttggaaatgtaattctaaaacttacaacacgggataaattatttaataaagtatatataagttattgcatggcgtgttttattaatcaatcgttggaggatttatcgcatactagtatttacaatgtagaaattagaaagattaaatcattaaatgattgtattaacgacgataaatacgaatatctgtcttatatttataatatgctagttaatagtaaatgaacttttacagatctagtataattagtcagattattaagtataatagacgactagctaagtctattatttgcgaggatgactctcaaattattacactcacggcattcgttaaccaatgcctatggtgtcataaacgagtatccgtgtccgctattttattaactactgataacaaaatattagtatgtaacagacgagatagttttctctattctgaaataattagaactagaaacatgtctagaaagaaacgattatttctgaattattccaattatttgtccaaacaggaaagaagtatactatcgtcatttttttctctagatccagctactactgataatgatagaatagatgctatttatccgggtggcatacccaaaaggggtgagaatgttccagagtgtttatccagggaaattaaagaagaagttaatatagacaattcttttgtattcatagacactcggttttttattcatggcatcatagaagataccattattaataaattttttgaggtaatcttctttgtcggaagaatatctttaacgagtgatcaaatcattgatacatttaaaagtaatcatgaaatcaaggatctaatatttttagatccgaattcaggtaatggactccaatacgaaattgcaaaatatgctctagatactgcaaaactcaaatgttatggccatagaggatgttattacgaatcattaaaaaaattaactgaggatgattgattagaaaatataaattaatttaccatcgtgtatttttataacgggattgtccggcatatcatgtagatagttaccgtctacatcgtatactcgaccatctacgcctttaaatcctctatttattgacattaatctattagaattggaataccaaatattagtaccctcaattagtttattggtaatattttttttagacgatagatcgatggctcttgaaaccaaggttttccaaccggactcattgtcgatcggtgagaagtctttttcattagcatgaatccattctaatgatgtatgtttaaacactctaaacaattggacaaattcttttgatttgctttgaatgatttcaaataggtcttcgtctacagtaggcataccattagataatctagccattataaagtgcacgtttacatatctacgttctggaggagtaagaacgtgactattgagacgaatggctcttcctactatctgacgaagagacgcctcgttccatgtcatatctaaaatgaagatatcattaattgagaaaaaactaataccctcgcctccactagaagagaatacgcatgttttaatgcattctccgttagtgtttgattcttggttaaactcagccaccgccttgattctagtatcttttgttctagatgagaactctatattagagataccaaagactttgaaatatagtaataagatttctattcctgactgattaacaaatggttcaaagactagacatttaccatgggatgctaatattcccaaacatacatctataaatttgacgcttttctcttttaattcagtaaatagagagatatcagccgcactagcatcccctttcaatagttctccctttttaaaggtatctaatgcggatttagaaaactctctatctcttaatgaatttttaaaatcattatatagtgttgctatctcttgcgcgtattcgcccggatcacgattttgtctttcaggaaagctatcgaacgtaaacgtagtagccatacgtctcagaattctaaatgatgatatacctgtttttatttcagcgagtttagccttttgataaatttcttcttgctttttcgacatattaacgtatcgcattaatactgttttcttagcgaatgatgcagacccttctacgtcatcaaaaatagaaaactcgttattaactatgtacgaacataggcctcctagtttggagactaattctttctcatcaactagacgtttattctcaaatagcgattggtgttgtaaggatcctggtcgtagtaagttaaccaacatggtgaattcttgcacactattaacgataggtgtagccgataaacaaatcatcttatggttttttaatgcgatggtcttagataaaaaattatatactgaacgagtaggacggatcttaccatcttctttgattaatgatttagaaatgaagttatgacattcatcaataatgacgcatattctactcttggaattaatagttttgatattagtaaaaaatttatttctaaaattttgatcatcgtaattaataaaaatacaatccttcgttatctctggagcgtatctgagtatagtgttcatccaaggatcttctatcaaagcctttttcaccaataagataatagcccaattcgtataaatatccttaagatgtttgagaatatatacagtagtcattgttttaccaacacccgtttcatggaacaataaaagagaatgcatactgtctaatcctaagaaaactcttgctacaaaatgttgataatccttgaggcgtactacgtctgttcccatcatttcaacaggcatattagtagttctgcgcaatgcataatcgatataggccgcgtgtgatttactcatttatgagtgataagtaataactatgttttaaaaatcacagcagtagtttaactagtcttctctgatgtttgttttcgatactttttgaatcagaagtcatactagaataaagcaacgagtgaacgtaatagagagcttcgtatactctattcgaaaactctaagaacttattaatgaattccgtatccactggattgtttaaaatactaaattgaacactgttcacatccttccaagaagaagacttagtgacggacttaacatgagacataaataaatccaaattttttttacaaacatcactagccaccataatggcgctatctttcaaccagctatcgcttacgcattttagcagtctaacatttttaaagagactacaatatattctcatagtatcgattacacctctaccgaataaagttggaagtttaataatacaatatttttcgtttacaaaatcaaataatggtcgaaacacgtcgaaggttaacatcttataatcgctaatgtatagattgttttcagtgagatgattattagatttaatagcatctcgttcacgtttgaacagtttattgtgtgcgctgaggtcggcaactacggcgtccgctttagtactcctcccataatactttacgctattaatctttaaaatttcatagactttatctagatcgctttctggtaacatgatatcatgtgtaaaaagttttaacatgtcggtcggcattctatttagatcattaactctagaaatctgaagaaagtaattagctccgtattccagactaggtaatgggcttttacctaaagacaagttaagttctggcaatgtttcataaaatggaagaaggacatgcgttccctcccggatattttttacaatttcatccatttacaactctatagtttgttttcattattattagttattatctcccataatcttggtaatacttaccccttgatcgtaagataccttatacaggtcattacatacaactaccaattgtttttgtacataatagattggatggttgacatccatggtggaataaactactcgaacagatagtttatctttccccctagatacattggccgtaatagttgtcggcctaaagaatatctttggtgtaaagttaaaagttagggttcttgttccattattgctttttgtcagtagttcattataaattctcgagatgggtccgttctctgaatatagaacatcatttccaaatctaacttctagtctagaaataatatcggtcttattcttaaaatctattcccttgatgaagggatcgttaatgaacaaatccttggcctttgattcggctgatctattatctccgttatagacgttacgttgactagtccaaagacttacaggaatagatgtatcgatgatgttgatactatgtgatatgtgagcaaagattgttctcttagtggcatcactatatgttccagtaatggcggaaaactttttagaaatgttatatataaaagaattttttcgtgttccaaacattagcagattagtatgaagataaacactcatattatcaggaacattatcaatttttacatacacatcagcatcttgaatagaaacgataccatcttctggaacctcaacaatctcggcagactccggataaccagtcggtgggccatcactaacaataactagatcatccaacaatctactcacatatgcatctatataatctttttcatcttgtgagtaccctggatacgaaataaatttattatccgtatttccataataaggtttagtataaacagagagcgatgttgccgcatgaacttcagttacagtcgccgttggttggtttatttgacctattactctcctaggtttctctataaacgatggtttaatttgtacattcttaaccatatatccaataaagctcaattcaggaacataaacaaattctttgttgaacgtttcaaagtcgaacgaagagtcacgaataacgatatcggatactggattgaaggttaccgttacggtaatttttgaatcggatagtttaagactgctgaatgtatcttccacatcaaacggagttttaatataaacgtatactgtagatggttctttaatagtgtcattaggagttaggccaatagaaatatcattaagttcactagaatatccagagtgtttcaaagcaattgtattattgatacaattattatataattcttcgccctcaatttcccaaataacaccgttacacgaagagatagatacgtgattaatacatttatatccaacatatggtacgtaaccgaatcttcccatacctttaacttctggaagttccaaactcagaaccaaatgattaagcgcagtaatatactgatccctaatttcgaagctagcgatagcctgattgtctggaccatcgtttgtcataactccggatagagaaatatattgcggcatatacaaagttggaatttgactatcgactgcgaagacattagaccgtttaatagagtcatccccaccgatcaaagaattaatgatagtattattcattttctatttaaaatggaaaaagcttacaataaactccgtagagaaatatctataatttgtgagttttccttaaagtaacagcttccgtaaacgccgtctttatctcttagtaggtttattgtatttatgaccttttccttatcttcatagaatactaaaggcaacaaagaaatttttggttcttctctaagagctacgtgagacttaaccatagaagccaacgaatccctacatattttagaacagaaatacccaacttcaccacccttgaatgtctcaatactaataggtctaaaaaccaaatcttgattacaaaaccaacacttatcaattacactatttgtcttaatagacacatctgccatagatttataatactttggtagtatacaagcgagtgcttcttctttagcgggcttaaagactgctttaggtgctgaaataaccacatctggaaggcttactcgcttagccatttaattacggaactatttttttatacttctaatgagcaagtagaaaacctctcatctacaaaaacatactcgtgtccataatcctctaccatagttacacgttttttagatctcatatgtgctaaaaagttttcccatactaattggttactattatttttcgtataatttttaacagtttgaggttttagatttttagttacagaagtgatatcgaatattttatccaaaaagaatgaataattaattgtcttagaaggagtgttttcttggcaaaagaataccaagtgcttaaatatttctactacttcattaatcttttctgtactcagattcagtttctcatcttttacttgattgattatttcaaagactaacttataatcctttttatttattctctcgttagccttaagaaaactagatacaaaatttgcatctacatcatccgtggatatttgatttttttccatgatatccaagagttccgagataatttctccagaacattgatgagacaataatctccgcaatacatttctcaaatgaataagtttattagacacatggaagtttgactttttttgtacctttgtacatttttgaaatacagactcgcaaaaaatacaatattcatatccttgttcagatactataccgttgtgtctacaaccgctacataatcgtagattcatgttaacactctacgtatctcgtcgtccaatattttatataaaaacattttatttctagacgttgccagaaaatcctgtaatatttttagttttttgggctgtgaataaagtatcgccctaatatggttaccgtcctccgccaatatagtagttaaattatccgcacatgcagaagaacaccgcttaggcggattcagtacaatgttatatttttcgtaccaactcatttaaatatcataatctaaaatagttctgtaatatgtctagcgctaatatattgatcataatcctgtgcataaattaagatacaacaatgtctcgaaatcatcgacatggcttcttccatagttagaagatcgtcgtcaaagttagcaacgtgattcatcaacatttgctgttttgaggcagcaaatactgaaccgtcgccattcaaccattcataaaaaccatcgtctgaatccattgataatttcttgtactggtttttgagagctcgcatcaatctagcatttctagctcccggattgaaaacagaaagaggatcgtacatccagggtccattttctgtaaatagaatcgtataatgtcccttcaagaagatatcagacgatccacaatcaaagaattggtctccgagtttgtaacaaactgcggactttaacctatacatgataccgtttagcatgatttctggtgatacgtcaatcggagtatcatctattagagatctaaagccggtgtaacattctccaccaaacatattcttattctgacgtcgttctacataaaacatcattgctccattaacgataacaggggaatgaacagcactacccatcacattagttcccaatggatcaatgtgtgtaactccagaacatcttccatatcctatgttaggaggagcgaacaccactcttccactattgccatcgaatgccatagaataaatatccttggaattgatagaaatcggactgtcggatgttgtgatcatcttcataggattaacaactatgtatggtgccgcctgaagtttcatatcgtaactgatgccgtttataggtctagccacagaaaccaacgtaggtctaaatccaactatagacaaaatagaagccaatatctgttcttcatctgtcataacttgagagcatccagtatgaataatcttcattagatggggatctaccgcatcatcatcgttacaataaaaaattcccattctaatgttcataattgcttttctaatcatggtatgcatgtttgctctctgaatctctgtggaaattagatctgatacacctgtaatcactatcggattatcctccgtaagacgattaaccaacaacatataattataagactttacttttctaaattcataaagttgctggattaggctataggtgtctccatgtacatacgcgttctcgagcgcaggaagtttaataccgaatagtgccatcagaataggatgaatatagtaattagtttctggttttctataaataaaagacaaatcttgtgaactagacatatcggtaaaatgcatggattggaatcgtgtagtcgacagaagaatatgatgattagatggagagtatattttatctaactctttgagttggtcaccgattctaggactagctcgagaatgaataagtactaaaggatgagtacatttcacagaaacactagcattgttcaatgtgctctttacatgggtaaggagttgaaatagctcgtttctatttgttctgacaatatttagtttattcataatgttaagcatatcctgaatagtaaagttagatgtgtcatacttgttagtagttagatatttagcaattgcattcccatcatttctcaatctcgtactccaatcatgcgtggatgctacttcgtcgatggaaaccatacaatcctttttgataggctgttgagattgattatttcctgcacgtttaggtttggtacgttgatttctagcccctgcggatataaagtcatcgtctacaattttggataatgaattgcatacactacaagacaaagatttatcagaagtgtgaatatgatcttcatctaccaaagaaagagtttgattagtataactagattttagtcctgcgttagatgttaaaaaaacatcgctattgaccacggcttccattatttatattcgtagtttttactcgaaagcgtgattttaatattcaatcttattacttttggaatcgttcaaaacctttgactaattgtagaatttgatctattgccctacgcgtatactcccttgcatcatatacgttcgtcaccagatcgtttgtttcggcctgaagttggtgcatatctctttcaacattcgacatgagatccttaagggccatatcgtctagattttgttgagatgctgctcctggatttggattttgttgtgctgttgtacatactgtaccaccagtaggtgtaggagtacatacagtggccacaataggaggttgaggaggtgtaaccgttggagtagtacaagaaatacttccatccgattgttgtgtacatgtagttgttggtaacgtctgagaaggttgggtagatggcggtgtcgtcgtcttttgatctttattaaatttagagataatatcctgaacagcattgctcggcgtcaacgctggaaggagtgaactcgccggcgcatcagtatctgcagacagccaatcaaaaagattagacatatcagatgatgtattagtttgttgtcgtggttttggtgtaggagccggtgtagctgttggaaccggctgtggagttatatgaatagttggttgtagcggttggataggctgtctgctggcggccatcatattatctctagctagttgttctcgcaactgtctttgataatacgactcttgagactttagtcctatttcaatcgcttcatcctttttcgtatccggatccttttcttcagaataatagattgacgactttggtgtagaggattctgccagcccctgtgagaacttgttaaagaagtccatttaaggctttaaaattgaattgcgattataagattaaatggcagacacagacgatattatcgactatgaatccgatgatctcaccgaatacgaggatgatgaagaagaggaagaagatggagagtcactagaaactagtgatatagatcccaaatcttcttataagattgtagaatcagcatccactcatatagaagatgcgcattccaatcttaaacatatagggaatcatatatctgctcttaaacgacgctatactagacgtataagtctatttgaaatagcgggtataatagcagaaagctataacttgcttcaacgaggaagattacctctagtttcagaattttctgacgaaacgatgaagcaaaatatgctacatgtaattatacaagagatagaggagggttcttgtcctatagtcatcgaaaagaacggagaattgttgtcggtaaacgattttgacaaagatggtctaaaattccatctagactatattatcaaaatttggaaacttcaaaaacgatattagaatttatacgaatatcgttctctaaatgtcacaatcaagtctcgcatgttcagcaatttattgtcgtactttatatcgtgttcattaacgatatcttgcaaaatagtaatgattctatcttccttcgatagatattcttcagagattattgtcttatattctttcttgttatcagatatgaatttgataagactttgaacattattgatacccgtctgtttaattttttctacagatattttagttttggcagattctatcgtatctgtcaatagacatccaacatcgacattcgacgtcaattgtctataaatcaacgtataaattttagaaataacattagcgaattgttgtgcattgatgtcgttattctgaaacagtatgattttaggtagcattttcttaacaaagagaacgtatttattgttactcagttgaacagatgatatatccagattactaacgcatctgattccatataccaaactttcagaagaaatggtgtacaattgtttgtattcattcaatgtctctttttcagaaattagtttagagtcgaatactgcaataattttcaagagatagttttcatcagataagattttatttagtgtagatatgataaaactattgttttgttggagaacttgatacgccgcgttctctgtagtcgacgctctcaaatgggaaacaatctccattatttttttggaatcggatacaatatcttcggtatcttgacgcaatctagtatacatagagttaagagaaattagagtttgtacattaagcaacatgtctctaaatgtggctgcaaacttttccttttccacatcatctagtttattatataccgatttcacaacggcaccagatttaaggaaccagaatgaaaaactctgataactacaatatttcatcatagttacgattttatcatcttctatagttggtgtaatagcgcatacctttttctccaagactggaaccaacgtcataaaaatgtttaaatcaaaatccatatcaacatctgatgcgctaagaccagtctcgcgttcaagattatctttactaatggtgacgaactcatcgtatagaactctaagtttgtccattatttatttacagatttagttgtttaatttatttgtgctcttccagagttgggatagtatttttctaacgtcggtattatattattaggatctacgttcatatgtatcataatattaatcatccacgttttgataaatctatctttagcttctgaaataacgtatttaaacaaaggagaaaaatatttagctacggcatcagacgcaataacattttttgtaaatgtaacgtatttagacgacagatcttcgttaaaaagttttccatctatgtagaatccatcggttgttaacaccattcccgcgtcagattgaataggagtttgaatagtttgttttggaaatagatccttcaataacttatagttgggtgggaaaaaatcgattttatcactagactctttcttttttactatcattacctcatgaactatttcttgaatgagtatatgtattttctttcctatatcggacgcgttcattggaaaatataccatgtcgttaactataagaatatttttatcctcgtttacaaactgaataatatcagatgtagttcgtaaacgaactatatcatcaccagcacaacatctaactatatgatatccactagtttcctttagtcgtttattatcttgttccatattagcagtcattccatcatttaagaaggcgtcaaagataatagggagaaatgacattttggattctgttacaactttaccaaaattaaggatatacggacttactatctttttctcaacgtcgatttgatgaacacacgatgaaaatgtacttcgatgagattgatcatgtagaaaacaacaagggatacaatatttccacatatcatgaaatatattaagaaatcccaccttattatatttccccaaaggatccatgcatgtaaacattatgccgttatcattaataaagacttctttctcatcggatctgtaaaagttgttactgatttttttcattccaggatctagataattaataatgatgggttttctattcttattctttgtattttggcatatcctagaccagtaaacagtttccactttggtaaaatcagcagacttttgaacgctattaaacatggcattaatggcaataactaaaaatgtaaaatatttttctatgttaggaatatggtttttcactttaatagatatatggtttttggccaaaatgatagatatttttttatccgaggatagtaaaatattattagtcgccgtctctataaaaatgaagctagtctcgatatccaattttattctagaattgataggagtcgccaaatgtaccttatacgttatatctcccttgatgcgttccatttgtgtatctatatcggacacaagatctgtaaatagttttacgttattaatcatcacggtatcgccgtcgctagataacgctaatgtaccatccaagtcccaaatggagagatttaactgttcatcgtttagaataaaatgattaccggtcatattaataaagtgttcatcgtatctagataacaacgacttataattaatgtccaagtcttgaactcgctgaatgatcttttttaacccagttagttttagattggtacgaaatatattgttaaactttgattctacagtaatgtccaaatctagttgtggaaatacttccatcaacattgtttcaaacttgataatattattatctacatcttcatacgatccaaattccggaatagatgtatcgcacgctctggccacccagataaccaaaaagtcacacgctccaggatatacattgtataaaaagctatcgttttttagtagtgtttttttctgagtatatacgaagggattaaaaatagtattatcaacgtaactatattccaaattattcttatgagaatagataataatatcgtccttaatatctaacaaatttcctaaatatccctttaattgagtcattcgaagcgtcaatagaatatgtctcttaactatttccggctgttgtatatttaaatgacttcgtaaaaaataatatatgggcgacttctcatctatgtaatcatatggagtgagatatagggctcgttctacctcctgccccttacccacctgtaataccaattgcggacttactatatatcgcatatttatatcgtggggtaaagtgaaaatctactaccgatgatgtaagtcttacaatgttcgaaccagtaccagatcttaatttggaggcctccgtagaactaggggaggtaaatatagatcaaacaacacctatgataaaggaaaatagcggttttatatcccgtagtagacgtctattcgcccatagatctaaggatgatgagagaaaactagcactacgattctttttacaaagactttattttttagatcatagagagattcattatttgttcagatgcgttgacgctgtaaaagacgtcactattaccaaaaaaaataacattatcgtggcgccttatatagcacttttaactatcgcatcaaaaggatgcaaacttacagaaacaatgattgaagcattctttccagaactatataatgaacatagtaagaaatttaaattcaactctcaagtatccatcatccaagaaaaactcggataccagtttggaaactatcacgtttatgattttgaaccgtattactctacagtagctctggctattcgagatgaacattcatctggcatttttaatatccgtcaagagagttatctggtaagttcattatctgaaataacatatagattttatctaattaatctaaaatctgatcttgttcaatggagtgctagtacgggcgctgtaattaatcaaatggtaaatactgtattgattacagtgtatgaaaagttacaactggtcatagaaaatgattcacaatttacatgttcattggctgtggaatcaaaacttccaataaaattacttaaagatagaaatgaattatttacaaaattcatcaacgagttaaaaaagaccagttcattcaagataagcaaacgcgataaggatacgctactaaaatattttacttaggactggagttagaatttatagacgactcatttcgtttatcattattagtattcttcttgttatcttgttcagaaatatacagcaatgctatgcctaatactaaatacattatcatgcttgcaatggctctaacaacgacgaaccaaaatgaatttggtcgtagcttttgttcacaaaaatacataaagaaatgtctacataaatctatggcgccattggctacttgaaatagcgccagtcctcctacagattttaatatagctgtataacatgacatttattcatcatcaaaagagacagagtcaccatctgtcatatttagattttttttcatgtgttcaaagtatcctctactcatttcattataatagtttatcatacttagaattttaggacggatcaatgagtaagacttgactagatcgtcagtagtaatttgtgcatcgtctattctgcatccgcttcgtcgaataatgtatagcatcgctttgagattctccatagctatcaagtctttatacaatgacatggaaatatctgtgaatactttatacttctccaacatcgatgccttaacatcatcgcctactttagcattgaaaatacgttctattgtgtagatggatgtagcaagatttttaaacaacaatgccatcttacacgatgattgcctcaagtctccaatcgtttgtttagaacgattagctacagagtccaatgcttggctgactagcatattattatctttagaaattgtattcttcaatgaggcgtttatcatatctgtgatttcgttagtcatattacagtctgactgggttgtaatgttatccaacatatcacctatggatacggtacacgtaccagcatttgtaataatcctatctaagatgttgtatggcattgcgcagaaaatatcttctcctgtaatatttccactctcgataaatctactcagattattcttaaatgccttattctctggagaaaagatatcagtgtccatcatttcattaatagtatacgcagaaaagataccacgagtatcaattctatccaagatacttatcggttccgagtcacagataatggtttcctctccttcgggagatcctgcatagaaatatctaggacaatagtttctatactgtctgtaactctgataatctctaaagtcactaactgataccatgaaattgagaagatcaaacgctgaagtaattaatttttctgcctcgtttttactacaactagttttcatcaatgtagtgacgatgtattgtttagttacttttggtctaatactgatgatagagatattattacttcccataatggatcttctagtagtcaccttaaagcccattgatgcaaatagcagatagataaagtcttggtatgactcctttctaatatagtacggactacctttgtcacccaactttatacccacataagccataacaacctctttaatagccgtttcatgaggtttatcagccatgagcctgagtagttggaagaatctcatgaatcctgtctcagaaagtcctatatgcatgatagatttatctttcctgggaaactctcgtatagtcatagatgaaatactcttcaaagtttctgaaataagattagtaacagtcttacctccgactactctaggtaacaaacaaactctaataggtgttttctctgcggagataatatcagaaaggatagagcaataagtagtattattgtgattataaagaccgaatacataacaggtagaatttataaacatcatgtcctgaaggtttttagacttgtattcctcgtaatccataccgtcccaaaacatggatttggtaactttgatagccgtagatctttgttccttcgccaacaggttaaagaaattaataaagaatttgtggtttctacctatgtctacaaattgcacgtttggaagcgccacggttacattcactgcagcattttgaggatcgcgagtatgaagtacgatgttattgtttactggtatatctggaaagaattctaccagtctaggaataagagattgatatcgcatagaaatacaaaagttcataatctcatcatctaagagcattttgttaccattgtaataaatatccactctgtcatatgtataaatgaagtactgttcaaacatgatgagatgtttatatgttggcatagtagtgagatctacgtttggtaatggcaatgtattaagattaactccataatgtctagcagcatctgcgatgttataagcgttgtcaaagcggggtcgatcttgtgctgttatatattgtctaacacctataagattatcaaaatcttgtctgcttaatacaccgttaacaatttttgccttgaattcttttattggtgcattaataacatccttatagaggatgttaaacaaataagtgttatcaaagttaagatctggatatttcttttctgctagaacatccattgagtcggagccatctggtttaatataaccaccgataaatctagctctgtattctgtatccgtcaatctaatattaagaaggtgttgagtgaaaggtggaagatcgtaaaagctgtgagtattaatgataggattagtttccgaactaatgttaattggggtattaataatatctatatttccagcgttaagtgtaacattaaacagttttaattcacgtgacgtggtatcaattaaataattaatgcccaatttggatatagcagcctgaagctcatcttgtttagttacggatcctaatgagttattaagcaatatatcgaacggatgaacgaaggttgttttaagttggtcacatactttgtaatctagacatagatgcggaagaacggtagaaactatacgaaataaatattcagagtcctctaattgatcaagagtaactattgacttaataggcatcatttatttagtattaaatgacgaccgtaccagtgacggatatacaaaacgatttaattacagagttttcagaagataattatccatctaacaaaaattatgaaataactcttcgtcaaatgtctattctaactcacgttaacaacgtggtagatagagaacataatgccgccgtagtgtcatctccagaggaaatatcctcacaacttaatgaagatctatttccagatgatgattctccggccactattatcgaacgagtacaacctcatactactattattgacgatactccacctcctacgtttcgtagagagttattgatatcggaacaacgtcaacaacgagaaaaaagatttaatattacagtatcgaaaaatgctgaagcaataatggaatctagatctatgatatcttctatgccaacacaaacaccatccttgggagtagtttatgataaagataaaagaattcagatgttggaggatgaagtggttaatcttagaaatcaacgatctaatacaaaatcatctgataatttagataattttaccagaatactatttggtaagactccgtataaatcaacagaagttaataagcgtatagccatcgttaattatgcaaatttgaacgggtctcccttatcagtcgaggacttggatgtttgttcagaggatgaaatagatagaatctataaaacgattaaacaatatcacgaaagtagaaaacgaaaaattatcgtcactaacgtgattattattgtcataaatattatcgagcaagcattgctaaaactcggatttgaagaaatcaaaggactgagtaccgatatcacttcagaaattatcgatgtggagatcggagatgactgcgatgctgtagcatcaaaactaggaatcggtaacagtccggttcttaatattgtattgtttatactcaagatattcgttaaacgaattaaaattatttaatttaatacattcccatatccagacaacaatcgtctggattaatctgttcctgtcgtctcataccggacgacatattaatctttttattagtaggcatctttttagatggtttctttttcccagcattaactgagtcgatacctagaagatcgtgattgatctctccgaccattccacgaacttctaattggccgtctctgacggtaccataaactattttaccagcattagtaacagcttggacaatctgaccatccattgcgttgaatgatgtagttgctgttgttctacgtttaggagcaccagaagtatttttggagcccttggatgttgatgtagaagaagacgaggattttgattttggtttacatgtaatacattttgaactctttgattttgtatcacatgcgccggcagtcacatctgtttgagaattaagattattgttgcctcctttgacggctgcatctccaccgatttgcgctagtagatttttaagctgtggtgtaatcttattaactgtttcgatataatcatcgtaactgcttctaacggctaaattttttttatccgccatttagaagctaaaaatatttttatttatgcagaagatttaactagattatacaatgaactaatatgatccttttccagattatttacaaacttggtatttcttggttctggaggaggcgaatttaaattcggacttggattcggattttgtgagttcttgatcttattatacagcgcatataggatggcgacggtaactgctacgcaaataccgatcaacaaaagaataccaatcatttattgacaataacttcactattgatcaagtatgcaatatatcatcttttcactaaataagtagtaataatgattcaacaatgtcgagatatatggacgataataacttagttcacggaaatatcgctatgattggtgtgaatgactccgctaactctgtggggcgcgcagtgctttccccacatagaataaattagcattccgactgtgataataataccaagtataaacgccataatactcaatactttccatgtacgagtgggactggtagacttactaaagtcaataaaggcgaagatacacgaaagaatcaaaagaatgattccagcgattagcacgccggaaaaataatttccaatcataagcatcatgtccatttaactaataaaaattttaaatcgccgaatgaacaaagtggaatataaaccatataaaaacaatagtttgtactgcaaaaataatatctatttttgttttcgaagatatggtaaaattaaatagtagtacacagcatgttataactaacagcagcaacggctcgtaattacttatcatttactagacgaaaaggtggtgggatattttcttgctcaaataatacgaatatatcacccatccattttatgcgatgtttatatactctaatctttaatagatctatagacgacgggtttaccaacaatatagattttatcgattcatctaatttaaacccttccttaaacgtgaatgatctattatctggcataacgatgactctacctgatgaatcggacaatgtactgggccatgtagaataaattatcaacgaattatcgtctacgaacatttatatcatttgttttaattttaggacgcgaataaatggatataaaatagaaaataacagatattacaaccagtgttatggccgcgcccaaccaggtaggcagttttattttatcttttactacaggttctcctggatgatgtacgttaccaactgcagacgtagttctagtacaattagacgtaagttccgcttgggaattttttaacgctaaagagttaacgttaatcgtgcacccaacgtatttacatctagttctttgaacatcttgattataatataaccattttctatctctagattcgtcggtgcactcatgtaaccaacataccctaggtcctaaatatttatctccggaattagattttggataattcgcgcaccaacaatttctatttcctttatgatcgttacaaaagacgtataatgccgtatccccaaaagtaaaataatcaggacgaataattctaataaactcagaacaatatctcgcatccatatgtttggagcaaatatcggaataagtagacatagccggtttccgttttgcacgtaaccattctaaacaattggggtttccaggatcgtttctacaaaatccagtcatgaaatcgtcacaatgttctgtcttgtaattattattaaatatttttggacagtgtttggtatttgtcttagaacaacattttgctacgctatcactatcgcccaggagataatccttttttataaaatgacatcgttgcccggatgctatataatcagtagcgtgttttaaatccttaatatattcaggagttacctcgttctgataatagattaatgatccaggacgaaatttgaaagaactacatggttctccatgaattaatacatattgtttagcaaattcaggaactataaaactactacaatgatctatcgacataccatctatcaaacaaaacttgggtttaatttctcccggagatgtttcataatagtacgtataactttcttctgcaaacttaacagctctattatattcaggataattaaaacctaattccatatatttgtctcgtatatctgctattcctggtgctattttgattctattaagagtaacggctgcccccatttttaataatcgtcagtatttaaactgttaaatgttggtatatcaacatttaccttatttcccgcagtataaggtttgttgcaggtatactgttcaggaatggttacatttatactttttctatagtcctgtctttcgatgttcatcacatatgcaaagaacagaataaacaaaataatgtaagaaataatattaaatatctgtgaattcgtaaatacattgattgccataataattacagcagctacaatacatacaatagacattcccacagtgttgccattacctccacgatacatttgagttactaagcaataggtaataactaagctagtaagaggcaatagaaaagatgagataaatatcatcaatatagagattagaggagggctatatagagccaagacgaacaaaatcaaaccgagtaacgttctaacatcattatttttgaagattcccaaataatcattcattcctccataatcgttttgcatcatacctccatctttaggcataaacgattgctgctgttcctctgtaaataaatctttatcaagcactccagcacccgcagagaagtcgtcaagcatattgtaatatcttaaataactcatttatatattaaaaaatgtcactattaaagatggagtataatctttatgccgaactaaaaaaaatgacttgtggtcaacccctaagtctttttaacgaagacggggatttcgtagaagttgaaccgggatcatcctttaagtttctgatacctaagggattttacgcctctccttccgtaaagacgagtctagtatttgaaacattaacaacgaccgataataaaattactagtatcaatccaacaaatgcgccaaagttatatcctcttcaacgcaaagtcgtatctgaagtagtttctaatatgaggaaaatgatcgaatcaaaacgtcctctatacatcactcttcacttggcgtgtggatttggtaagactattaccacgtgttatcttatggctacacacggtagaaaaaccgtcatttgcgtacccaataaaatgttaatacatcaatggaagacacaggtagaggcagtcggattggaacataagatatccatagatggagtaagtagtctattaaaggaactaaagactcaaagtccggatgtattaatagtagtcagtagacatctgacaaacgatgccttttgtaaatatatcaataagcattatgatttgttcatcttggatgaatcacatacgtataatctgatgaacaatacagcagttacaagatttttagcgtattatcctccgatgatgtgttattttttaactgctacacctagaccatctaacagaatttattgtaacagtattattaatattgccaagttatccgatctaaaaaaaactatctatgcagtagatagtttttttgagccatattccacagataatattagacatatgataaaacgattagatggaccatctaataaatatcatatatataccgagaagttattatctgtagacgagcctagaaatcaacttattcttaataccctggtagaagaattcaagtcaggaactattaatcgcattttagttattactaaactacgtgaacatatggtattcttctacaaacgattattagattttttcggatcagaggttgtatttataggagacgcccaaaatagacgtactccagatatggtcaaatcaatcaaggaactaaatagatttatattcgtatccaccttattttattccggtactggtttagatattcctagtttggattctttgttcatttgctcggcagtaatcaacaatatgcaaatagagcaattactagggagggtatgtcgagaaacagaactattagataggacggtatatgtatttcctagcacatccatcaaagaaataaagtacatgataggaaatttcgttcaacgaattattagtctgtctgtagataaactaggatttaaacaaaaaagttatcggaaacatcaagaatccgatcccacttctgtatgtacaacatcctccagagaagaacgtgtattaaatagaatatttaactcgcaaaatcgttaagaagtttaagcgacgatccgcatgctgcgcaggccagtgtattacccctcatagtattaatataatccaatgatacttttgtgatgtcggaaatcttaaccaatttagactgacaggcagaacacgtcatgcaatcatcatcgtcatcgataactgtagtcttgggcttctttttgcggctcttcattccggaacgcacattggtgctatccatttaggtagtaaaaaataagtcagaatatgccctatagcacgatcgtgcaaaacctggtatatcgtctctatctttatcacaatatagtgtatcgacatctttattattattgacctcgtttatcttggaacatggaatgggaacatttttgttatcaacggccacctttgccttaattccagatgttgtaaaattataactaaacagtctatcatcgacacaaatgaaattcttgtttagacgtttgtagtttacgtatgcggctcgttcgcgtctcattttttcagatattgcaggtactataatattaaaaataagaatgaaataacataggattaaaaataaagttatcatgacttctagcgctgatttaactaacttaaaagaattacttagtctgtacaaaagtttgaaattttcagattctgcggctatagaaaagtataattctttggtagaatggggaacatctacttactggaaaataggcgtgcaaaaggtagctaatgtcgagacgtcaatatctgattattatgatgaggtaaaaaataaaccgtttaatattgatccgggctattacattttcttaccggtatattttgggagcgtctttatttattcgaagggtaaaaatatggtagaacttggatctggaaactcttttcaaataccagatgatatgcgaagtgcgtgtaacaaagtattagacagcgataacggaatagactttctgagatttgttttgttaaacaatagatggataatggaagatgctatatcaaaatatcagtctccagttaatatatttaaactagctagtgagtacggattaaacatacccaaatatttagaaattgaaatagaggaagacacattatttgacgacgagttatactctattatagaacgctctttcgatgataaatttccaaaaatatccatatcgtatattaagttgggagaacttaggcggcaagttgtagactttttcaaattctcattcatgtatattgagtccatcaaggtagatcgtataggagataatatttttattcctagcgttataacaaaatcaggaaaaaagatattagtaaaagatgtagaccatttaatacgatccaaggttagagaacatacatttgtaaaagtaaaaaagaaaaacacattttccattttatacgactatgatggaaacggaacagaaactagaggagaagtaataaaacgaattatagacactataggacgagactattatgttaacggaaagtatttctctaaggttggtagtgcaggcttaaagcaattgactaataaattagatattaatgagtgcgcaactgtcgatgagttagttgatgagattaataaatccggaactgtaaaacgaaaaataaaaaaccaatcagcatttgatttaagcagagaatgtttgggatatccagaagcggattttataacgttagttaataacatgcggttcaaaatagaaaattgtaaggttgtaaatttcaatattgaaaatactaattgtttaaataacccgagtattgagactatatatggaaactttaaccagttcgtctcaatctttaatatcgtcaccgatgtcaaaaaaagattattcgagtgaaataatatgcgcctttgatataggtgcaaaaaatcctgccagaactgttttagaagtcaaggataactccgttagggtattggatatatcaaaattagactggagttctgattgggaaaggcacatagctaaagatttgtcacaatatgaatacactacagttcttctagaacgtcagcctagaaggtcgccgtacgtcaaatttatctattttattaaaggctttttatatcatacatcggctgccaaagttatttgcgtctcgcctgtcatgtctggtaattcatatagagatcgaaaaaagagatcggtcgaagcatttcttgattggatggacacattcggattgcgagactccgttccggatagacgcaaattagacgatgtagcggatagtttcaatttggctatgagatacgtattagataaatggaatactaattatacaccttataataggtgtaaatctagaaattacataaaaaaaatgtaataacgttagtaacgccattatggataatctatttacctttctacatgaaatagaagatagatatgccagaactatttttaactttcatctaataagttgcgatgaaataggagatatatatggtcttatgaaagaacgcatttcctcagaggatatgtttgataatatagtgtataataaagatatacatcatgccattaagaaactagtgtattgcgacatccaacttactaaacacattattaatcagaatacgtatccggtatttaacgattcttcacaagtgaaatgttgtcattatttcgatataaactcagataatagcaatattagctctcgtacagtagagatatttgagagggaaaagtcatctcttgtatcatatattaaaactaccaataagaagagaaaggtcaattatggggaaataaagaaaactgtacatggaggcactaatgcaaattacttttccggtaaaaagtctgatgagtatctgagcactacagtcaggtccaacattaatcaaccttggatcaaaaccatttctaagagaatgagagtagatatcattaatcactctatagtaacgcgtggaaaaagctctatattacaaactatagaaattatttttactaatagaacatgtgtgaaaatattcaaggattctactatgcacattattctatccaaggacaaggatgaaaaggggtgtatacacatgattgacaaattattctatgtctattataatttatttctgttgttcgaggatatcatccaaaacgagtactttaaagaagtagctaatgttgtaaaccacgtactcacggctacggcattagatgagaaattattcctaattaagaaaatggctgaacacgatgtttatggagttagcaatttcaaaatagggatgtttaacctgacatttattaagtcgttggatcataccgttttcccctctctgttagatgaggatagcaaaataaagttttttaaggggaaaaagctcaatattgtagcattacgatctctggaggattgtataaattacgtgactaaatccgagaatatgatagaaatgatgaaggaaagatcgactattttaaatagcatagatatagaaacggaatcggtagatcgtctaaaagaattgcttctaaaatgaaaaaaaaacactaattcagaaatggatcaacgactcggatataagtttttggtgcctgatcctaaagccggagttttttatagaccgttacatttccaatatgtatcgtattctaattttatattgcatcgattgcatgaaatcttgaccgtcaagcggccactcttatcgtttaagaataatacagaacgaattatgatagaaattagcaatgttaaagtgactcctccagattactcacctataatcgcgagtattaaaggtaagagttatgacgcattagccacgttcactgtaaatatctttaaagaggtaatgaccaaagagggtatatccatcactaaaataagtagttatgagggaaaagattctcatttgataaaaattccgctactaataggatacgggaataaaaatccacttgatacagccaagtatcttgttcctaatgtcataggtggagtctttatcaataaacaatctgtcgaaaaagtaggaattaatctagtagaaaagattacaacatggccaaaatttagggttgttaagccaaactcattcactttctcgttttcctccgtatcccctcctaatgtattaccgacaagatatcgccattacaagatatctctggatatatcacaattggaagcgttgaatatatcatcgacaaagacatttataacggtcaatattgttttgctgtctcaatatttatctagagtgagtctagaattcattagacgtagtttatcatacgatatgcctccagaagttgtctatctagtaaacgcgataatagatagtgctaaacgaattactgaatctattactgactttaatattgatacatacattaatgacctggtggaagctgaacacattaaacaaaaatctcagttaacgatcaacgagttcaaatatgaaatgctgcataactttttacctcatatgaactatacacccgatcaactaaagggattttatatgatatctttactaagaaagtttctctactgtatctaccacacttctagatatccagatagagattcgatggtttgtcatcgcatcctaacgtacggcaaatattttgagacgttggcacatgatgaattagagaattacataggcaacatccgaaacgatatcatgaacaatcacaagaacagaggcacttacgcggtaaacattcatgtactaacaactcctggacttaatcatgcattttctagtctattgagtggaaagttcaaaaagtcagacggtagttatcgaacacatcctcactattcatggatgcagaatatttctattcctaggagtgttggattttatccggatcaagtaaagatttcaaagatgttttctgtcagaaaataccatccaagtcaatatctttacttttgttcatcggacgttccggaaagaggtcctcaggtaggtttagtatctcaattgtctgtcttgagttccattacaaatatactaacgtctgagtatttggatttggaaaagaaaatttgtgagtatatcagatcatattataaagatgatataagttactttgaaacaggatttccaatcactatagaaaatgctctagtcgcatctcttaatccaaatatgatatgtgattttgtaactgactttagacgtagaaaacggatgggattcttcggtaacttggaggtaggtattactttagttagggatcacatgaatgaaattcgcattaatattggagcgggaagattagtcagaccattcttggttgtggataacggagagctcatgatggatgtgtgtccggagttagaaagcagattagacgacatgacattctctgacattcagaaagagtttccgcatgtcatcgaaatggtagatatagaacaatttacttttagtaacgtatgtgaatcggttcaaaaatttagaatgatgtcaaaggatgaaagaaagcaatacgatttatgtgactttcctgccgaatttagagatggatatgtagcatcttcactagtgggaatcaatcacaattctggacccagagctattcttggatgtgctcaagctaaacaagctatctcttgtctgagctcggatatacgaaataaaatagacaatggaattcatttgatgtatccagagaggccaatcgtgattagtaaggctttagaaacttcaaagattgcggctaattgcttcggccaacatgttactatagcattaatgtcgtacaaaggtatcaatcaagaggatggaattatcatcaaaaaacaatttattcagagaggcggtctcgatattgttacagccaagaaacatcaagtagaaattccgttggaaaactttaataacaaagaaagagataggtctaacgcctattcaaaattagaaagtaatggattagttagactgaatgctttcttggaatccggagacgctatagcacgaaatatctcatcaagaactcttgaagatgattttgctagagataatcagattagctttgatgtttccgaaaaatataccgatatgtacaaatctcgcgttgaacgagtacaagtagaacttactgacaaagttaaggtacgagtattaaccatgaaagaaagaagacccattctaggagacaaatttaccactagaacgagtcaaaagggaacagtcgcgtatatcgcggatgaaacggaacttccatacgatgaaaatggtatcacaccagatgtcattattaattctacatccatcttctctagaaaaactatatctatgttgatagaggttattttaacagccgcatattctgctaagccgtacaacaataagggagaaaaccgacctgtctgttttcctagtagtaacgaaacatccatcgatacatatatgcaattcgctaaacaatgttatgagcattcaaatccgaaattgtctgatgaagaattatcggataaaatcttttgtgaaaagattctctatgatcctgaaacggataagccttatgcatccaaagtattttttggaccaatttattacttgcgtctgaggcatttaactcaggacaaggcaaccgttagatgtagaggtaaaaagacgaagctcattagacaggcgaatgagggacgaaaacgtggaggaggtatcaagttcggagaaatggagagagactgtttaatagcgcatggtgcagccaatactattacagaagttttgaaagattcggaagaagattatcaagatgtgtatgtttgtgaaaattgtggagacatagcagcacaaatcaagggtattaatacatgtcttagatgttcaaaacttaatctctctcctctcttaacaaaaattgataccacacacgtatctaaagtatttcttactcaaatgaacgccagaggcgtaaaagttaaattagatttcgaacgaaggcctccttcgttttataaaccattagataaagttgatctcaaaccgtcttttctggtctaatattgtttagtagatacttatcaacatcatcaagattatcaagattatcaagattatcaagataagctaattcactaaacacattatcgatttcggtatcgttactcgcagaataaagttcgttatgatcctgatattcggaaatctgtggagtttcaggttttggtggatgtgtaacagctacttgagataccgaagtctgatattcagaaagctgtggatgttctggttcggcatccaccgatggtgttacaccactactaattggttcagtaacgtctgtggacgatggaggcaccacttctacaggttctggttctttatcctcagtcatcaacggagctacttcaatgcgaggaaatgtataatttggtaatggtttctcgtgtggatctgaagaagaggtaagatatctactagaaagataccgatcacgttctagttctcttttgtagaacttaactttttctttctcagcatctagttgatattccaacctcttcacgttactacgttcagatttcaattcacgttcgcatgggttacctccgcagtttttacgagcgatttcacgttcagccttcatgcgtctctccctctctctatcgagtttatcagagcagtctttctgaaggcgatcgaactccataaatttctccaacgctttgattgtttccatagatttccgaagttcagcttttaggactgtgattctttttctttcgaattcacagctggatgtacaaccgtttccattaccgccatctctaagtttcttttctagatcggcaacatttcatccccatgccttttacattcctcgagtctactgtcgtcgaaatatcgttccagctccttttcgacatcaataactttagcacgttgtctctcaagctctcttttgtagttatctgattccctggcacgtttaagatcttcatgcaattgagtcagctcttaacacaatctcttgcttcttcgtcatagtacgcgcaatcactgtgagatccattgttaccacgtctacactcggcgagctcgcgtttaagagattcaatttcccgtttgtattggtccatgtttccattgctaccaccattagatttacaggctgctagttgtcgttcgagatcagaaatacgggttttcttggaattgatttcgtcgatgtacttggcatcgaaacacttattaagttctttttccaattctacgattttatttctttcgcgagtcaattccctcctgtagtaactatctgttttgtcagattcacgctctctacgtagactttcttgcaagttactaatttgttccctagcacgtccgagtttagttttatatgctgaatagagttctgattcatcctttgagcagatctctagagatcgttcaagatccctgattctagtctttagcctatttacctcctcggaagatgctccgttaccgttgcgtttacactcgttaagctgtctatcaagatccatgattctatctctaagacgttgcatctctctttccatatcagcattgctttcattattacgtctgcagtcactcaactgtctttcaatatctgagattctatctctaagacgtcgcatctctctctgtttcggcattggtttcattattacgtctacagtcgttcaactgtctttcaagatctgatattctagattggagtctgctaatctctgtagcattttcacggcattcactcagttgtctttcaagatctgagattttagattggagtctgctaatctctgtaagatttcctcctccgctctcgatgcagtcggtcaacttattctctagttctctaatacgcgaacgcagtgcatcaacttcttgcgtgtcttcctggttgcgtgtacattcatcgagtctagattcgagatctctaacgcgtcgtcgttcttcctcaagttctctgcgtactacagaaagcgtgtccctatcttgttgatatttagcaatttctgattctagagtactgattttgcttacgtagttactaatatttgtcttggccttatcaagatcctccttgtatttgtcgcattccttgatatccctacgaagtctggacagttcccattcgacattacgacgtttatcgatttcagctcggagatcgtcatcgcgttgttttagccacatacgactgagttcaagttctcgttgacaagatccatctacttttccattcctaatagtatccagttccttttctagttctgaacgcatttctcgttccctatcaagcgattctctcaattctcggatagtcttcttatcaatttctaataaatctgaaccatcatctgtcccattttgaatatccctgtgttctttgatctcttttgtaagtcggtcgattctttcggttttataaacagaatccctttccaaagtcctaatcttactgagtttatcactaagttctgcattcaattcggtgagttttctcttggcttcttccaactctgttttaaactctccactatttccgcattcttcctcgcatttatctaaccattcaattagtttattaataactagttggtaatcagcgattcctatagccgttcttgtaattatgggaacataattaggatcttctaatggattgtatggcttgatagcatcatctttatcattattagggggatggacaaccttaattggttggtcctcatctcctccagtagcgtgtggttcttcaataccagtgttagtaataggcttaggcaaatgcttgtcgtacgcgggcacttcctcatccatcaagtatttataatcgggttctacttcagaatattcttttctaagagacgcgacttcgggagttagtagaagaactctgtttctgtatctatcaacgctggaatcaatactcaagttaaggatagcgaatacctcatcgtcatcatccgtatcttctgaaacaccatcatatgacatttcatgaagtctaacgtattgataaacagaatcagatttagtattaaacagatccttaacctttttagtaaacgcatatgtatattttagatctccagatttcataatatgatcacatgccttaaatgtcagtgcttccatgatataatctggaacactaatgggtgacgaaaaagatacagcaccatatgctacgttgataaataaatctgaaccactaagtagataatgattaatgttaaggaagaggaaatattcagtatatagatatgccttagcatcatatcttgtactaaacacgctaaacagtttattgatgtgatcaatttccaacagaataattagagcagcgggaataccaacaaacatattaccacatccgtattttctatgaatatcacatattatgttaaaaaatcttgatagaagagcgaatatctcgtctgacttaatgagacgtagttcagcagcagcataagtcataactgtaaatagaacatactttcctgtagtgttgattctagactccacatcaacaccattattaaaaatagttttatatacatctttaatctgctctccgttaatcgtcgaacgttctagtatacggaaacactttgatttcttatctgtagttaatgacttagtgatatcacgaagaatattacgaattacatttcttgtttttcttgagagacctgattcagaactcaactcatcgttccatagtttttttacctcagtggcgaaatctttggagtgcttggtacatttttcaataaggttcgtgacctccatttattataaaaaattttattcaaaacttaactacaatcgggtaattataaaatcgtagatctcccatgtggtggaatactaccatctatcgcatgtggatggacagtaggtaatggccatgggaacagtaatgtttgcatatttatctttcttgccagtattactgcatattgtcccaatgtttcgatgtgatgttctaacctatcaactgccgctgtatcacaacaatagtgtccgatgaaattaagattatgatccaatgtgtttaatatatgattatcaagtcttatacgatccgcgtcttttttgacaggatcaggttcttctacaggaagaagtttcggcctcttatgatattcatgtctgggaaacggtggtctagggtgaggctccggtatcggagtgggttttggattataatcatcatcgtctatgacatcatcttcgacttcgatatttattttgctatcttgatgatgtcctgtatcagttgcattttcagcactcgactgaatattagcgcattcattgtttattattaccatatttctaaacccaaaatgtatatgttgaacatcactactatcgttgatgagtcttatagcatgaattcgcttatcgttatcgggtttagcttctgtcaccttagcaattccttttttattaaactctacataatcatatccatttctattgtttgttctaatataaacgagtatagcatcattgctaaatttttcaatagtatcgaaaacagaatatcctaaaccatataatatatattcaggaacactcaaactaaatgtccaggattctcctaaatacgtaaactttaatagtgcgaaatcattcaaaaatctaccacttatagatagatagtacataaatgcgtatagtagtctacctatctctttattatgaaaaccggcattacgatcatatatgtcgtgatatacctgtgatccgtttacgttaaaccataaatacatgggtgatcctataaacatgaatttatttctaattctcagagctatagttaattgaccgtgtaatatttgcttacatgcatacttgatacgctcattaataagatttttatcattgctcgttatctcagaatcgtatatataaggagtaccatcgtgattcttaccagatattatacaaaatactatatataaaatatattgaccaacgttagtaatcatataaatgtttaacgttttaaattttgtattcaatgatccattatcatacgctagcatggtcttatgatattcattctttaaaatataatattgtgttagccattgcattggggctcctaatggagattttttattctcatccattttaggataggctttcataaagtccctaataacttcgtgaataatgtttctatgttttctactgatgcatgtatttgcttcgattttttttatcccatgtttcatctatcatagatttaaacgcagtaatgctcgcaacattaacatcttgaaccgttggtacaattccgttccataaatttataatgttcgccatttatataactcattttttgaatatacttttaattaacaaaagagttaagttactcatatggacgccgtccagtctgaacatcaatctttttagccagagatatcatagccgctcttagagtttcagcgtgattttccaacctaaatagaacttcatcgttgcgtttacaacacttttctatttgttcaaactttgttgttacattagtaatctttttttccaaattagttagccgttgtttgagagtttcctcattgtcgtctccatcggctttaacaattgcttcgcgtttagcctctggctttttagcagcctttgtagaaaaaaattcagttgctggaattgcaagatcgtcatctccggggaaaagagttccgtccatttaaagtacagattttagaaactgacactctgcgttatttatatttggtacaacacatggattataaatatcgatgttaataacatcagaaaatgtaaagtctatacattgttgcatcgtgttaaattttctaatggatctagtattattgggtccaacttctgcctgaaatccaaatatggaagcggatacaaaaccgtttcctggataaaccacacatctccacttttgctttacatcagaaattgtgtcattgacatcttgaactctcctatctaatgccggtgttccacctatagattttgaatattcgaatgctgcatgagtagcattaaattccttaatattgccataattttcatatattgagtaaccctggataaaaagtaaacacaccgcagccgtcgctaccacaataaaaaaaattgatagagagttcatttataatctattagaagctgacaaaatttttttacacgcatcagacaatgctttaataaatagttcaacatctacttttgtcatatcgaaccgatggtatgattctaacctagaattacatccgaaaaagttgactatgttcatagtcattaagtcattaacaaacaacattccagactctggattataagacgatactgtttcgtcacaatcacctaccttaatcatgtgattatgaatattggctattagagcaccttctaagaaatctataatatctttgaaacacgatttaaaatcaaaccacgaatatacttctacgaagaaagttagtttacccataggagagataactataaatggagatctagatacaaaatccggatctatgatagttttaacattattatattctctattaaatacctccacatctaaaaatgttaattttgaaactatgtcttcgtttattaccgtacctgaactaaacgctataagctctattgtttgagaactctttaaacgatattcttgaaatacatgtaacaaagtttcctttaactcggtcggtttatctaccatagttacagaatttgtatccttatctataatataataatcaaaatcgtataaagttatataattatcgcgttcagattgtgatcttttcaaatagactaaaaaccccatttctctagtaagtatcttatgtatatgtttgtaaaatatcttcatggtgggaatatgctctaccgcagttagccattcctcattgacagcggtagatgtattagacaaaactattccaatgtttaacaagggccattttacgagattattaaatccttgtttgataaatgtagccaatgagggttcgagttcaacgacgattgaattctcttcccgcggatgctgcatgatgaacgacgggatgttgttcgattgatttggaattctttttcgactttttgtttatattaaatattttaaaatttatagcggatagcaattcatgtaccacggataatgtagacgcgtattgcgcatcgatatctttattattagataaatttatcaataaatgtgagaagtttgcctcgttaaggtcttccatttaaatattatataaacatttgtgtttgtatcttattcgtcttttatggaatagttttttactagtaaagctgcaattacacactttgtccgtaaaacataaatataaacaccagcttttatcaatcgttccaaaaagtcgacggcggacatttttaacatggcatctattttaaatacacttaggtttttggaaaaaacatcattttataattgtaacgattcaataactaaagaaaagattaagattaaacataagggaatgtcatttgtattttataagccaaagcattctaccgttgttaaatacttgtctggaggaggtatatatcatgatgatttggttgtattggggaaggtaacaattaatgatctaaagatgatgctattttacatggatttatcatatcatggagtgacaagtagtggaacaatttacaaattgggatcgtctatcgatagactttctctaaataggactattgttacaaaagttaataattataattatgatacattttttgacgatgatgattgatcgctattgcacaattttgtttttttactttctaatatagcgtttagattctttttcatgtgcgaatattgatttactaaaatatctatgtttaacttttgttctataacgtccttatcggcggtatcggtacatatacgtaattcaccttcacaaaatacggagtcttcgataataatagccaatcgattattggatctagctgtctgtatcatattcaacatgtttaatatatcctttcgtttcccctttacaggcatcgatcgtagcatattttccgcgtctgagatggaaatgttaaaactacaaaaatgcgtaatgttagcccgtcctaatattggtacgtgtctataagtttggcatagtagaataatagacgtgtttaaatgccttccaaagtttaagaattctattagagtattgcattttgatagtttatcgcctacatcatcaaaaataagtaaaaagtgtgctgattttttatgattttgtgcgacagcaatacatttttctatgttacttttagttcgtatcagattatattctagagattcctgactactaacgaaattaatatgatttggccaaatgtatccatcataatctggattataaacgggtgtaaacaagaatacatgtttatattttttaactagtgtagaaaacagagatagtaaatagatagtttttccagatccagatcctcccgttaaaaccattctaaacggcatttttaataaattttctcttgaaaattgtttttcttggaaacaattcataattatatttacagttactaaattaatttgataataaatcaaaatatggaaaactaaggtcgttagtagggaggagaacaaagaaggcacatcgtgacataaataacatttattatcatgatgacaccagaaaacgacgaagagcagacatctgtgttctccgctactgtttacagagacaaaattcagggaaagaataaacgcaaacgcgtgattggtctatgtattagaatatctatggttatttcactactatctatgattaccatgtccgcgtttctcatagtgcgcctaaatcaatgcatgtctgctaacgaggctgctattactgacgccgctgttgccgttgctgctgcatcatctactcatagaaaggttgcgtctagcactacgcaatatgatcacaaagaaagctgtaatggtttatattaccagggttcttgttatatattacattcagactaccagttattctcggatgctaaagcaaattgcactgcggaatcatcaacactacccaataaatccgatgtcttgactacctggctcattgattatgttaaggatacatggggatctgatggtaatccaattacaaaaactacatccgattatcaagattctgatgtatcacaagaagttagaaagtatttttgtgttaaaacaatgaactaatatttatttttgtacattaataaatgaaatcgcttaatagacaaactgtaagtaggtttaagaagttgtcggtgccggtcgctataatgatgatactctcaaccattattagtggcataggaacatttctgcattacaaagaagaactgatgcctagtgcttgcgccaatggatggatacaatacgataaacattgttatttagatactaacattaaaatgtctacagataatgcggtttatcagtgtcgtaaattacgagccagattgcctagaccggatactagacatctgagagtattgtttagtattttttataaagattattgggtaagtttaaaaaagaccaataataaatggttagatattaataatgataaagatatagatattagtaaattaacaaattttaaacaactaaacagtacgacggatgctgaagcgtgttatatatacaagtctggaaaactggttgaaacagtatgtaaaagtactcaatctgtactatgtgttaaaaaattctacaagtgacaacaaaaaatgaattaataataagtcgttaacgtacgccgccatggacgccgcgtttgttattactccaatgggtgtgttgactataacagatacattgtatgatgatctcgatatctcaatcatggactttataggaccatacattataggtaacataaaaactgtccaaatagatgtacgggatataaaatattccgacatgcaaaaatgctactttagctataagggtaaaatagttcctcaggattctaatgatttggctagattcaacatttatagcatttgtgccgcatacagatcaaaaaataccatcatcatcatagcatgcgactatgatatcatgttagatatagaagataaacatcagccattttatctattcccatctattgatgtttttaacgctacaatcatagaagcgtataacctgtatacagctggagattatcatctaatcatcaatccttcagataatctgaaaatgaaattgtcgtttaattcttcattctgcatatcagacggcaatggatggatcataattgatgggaaatgcaatagtaattttttatcataaaagttgtaaagtaaataataaaacaataaatattgaactagtagtacgtatattgagcaatcagaaatgatgctggtacctcttatcacggtgaccgtagttgcgggaacaatattagtatgttatatattatatatttgtaggaaaaagatacgtactgtctataatgacaataaaattatcatgacaaaattaaaaaagataaagagttctaattccagcaaatctagtaaatcaactgatagcgaatcagactgggaggatcactgtagtgctatggaacaaaacaatgacgtagataatatttctaggaatgagatattggacgatgatagcttcgctggtagtttaatatgggataacgaatccaatgttatggcgcctagcacagaacacatttacgatagtgttgctggaagcacgctgctaataaataatgatcgtaatgaacagactatttatcagaacactacagtagtaattaatgaaacggagactgttgaagtacttaatgaagataccaaacagaatcctaactattcatccaatcctttcgtaaattataataaaaccagtatttgtagcaagtcaaatccgttcattacagaactcaacaataaatttagtgagaataatccgtttagacgagcacatagcgatgattatctaaataagcaagaacaagatcatgaacacgatgatatagaatcatcggtcgtatcattggtgtgattagtttcctttttataaaattgaagtaatatttagtattattgctgccgtcacgttgtacaaatggagatattccctgtattcggcatttctaaaattagcaattttattgctaataatgactgtagatattatatagatacagaacatcaaaaaattatatctgatgagatcaatagacagatggatgaaacggtacttcttaccaacatcttaagcgtagaagttgtaaatgacaatgagatgtaccatcttattcctcatagattatcgacgattatactctgtattagttctgtcggaggatgtgttatctctatagataatgacgtcaatggcaaaaatattctaacctttcccattgatcatgctgtaatcatatccccactgagtaaatgtgtcgtagttagcaagggtcctacaaccatactggttgctaaagcggatatacccagcaaacgattggtaacatcgtttacaaacgacatactgtatgtaaacaatctatcactgattaattatttgccgttgtctgtattcattattagacgagtcaccgactatttggatagacacatatgcgatcagatatttgctaataataagtggtattcccttataaccatcgacgataagcaatatcctattccatcaaattgtataggtatgtcttctgccaagtacataaattctagcatcgagcaagatactttaatacatgtttgtaacctcgagcatccattcgacttagtatacaaaaaaatgcagtcgtacaattctgtacctatcaaggaacaaatattgtacggtagaattgataatataaatatgagcattagtatttctgtggattaatagatttctagtatggggatcattaatcatctctaatctctaaatacctcataaaacgaaaaaaaagctattatcaaatactgtacggaatagattcattctcttctctttttatgaaactctgttgtatatctactgataaaactggaagcaaaaaatctgatagaaagaataagaataagatcaagatcaaggattatatggaacacgattattataaaataacaatagttcctggttcctcttccacgtctactagctcgtggtattatacacatgcctagtaatagtctctttgcgttgatggaaagcagactagaaataacaggctaaaatgttcagacaccataatagttcccaacccagataataacagagtaccatcaacacattcctttaaactcaatcccaaacccaaaaccgttaaaatgtatccggccaattgatagtagataatgaggtgtacagcgcatgataatttacacagtaaccaaaatgaaaatactttagtaattataagaaatatagatggtaacgtcatcatcaacaatccaataatatgccggagagtaaacattgacggataaaacaaaaatgctccgcataactctatcatggcaataacacaaccaaatacttgtaagattcctaaattagtagaaaatacaacggatatcgatgtataagtgatctcgagaaataataagaataaagtaatgcccgtaaagataaacatcaacattgtttggtaatcattaaaccaattagtatgacgttgaactaatttcacagtaaattttattccagtgttatcctcgcatgtataagtacctggtaagatatctttatattccataatcaatgagacatcactatctgataacgaatgaagtctagcactagtatgccatttacttaatattgtcgtcttggaagttttattataagttaaaatatcatggttatccaatttccatctaatatactttgtcggattatctatagtacacggaataatgatggtatcattacatgctgtatactctatggtctttgtagttgttataacaaccaacgtatagaggtatatcaacgatattctaactcttgacattttttatttatttaaaatgatacctttgttatttattttattctattttgctaacggtattgaatggcataagtttgaaacgagtgaagaaataatttctacttacttattagacgacgtattatacacgggtgttaatggggcggtatacacattttcaaataataaactaaacaaaactggtttagctaatactaattatatcacaacatctataaaagtagagaatgaggatacattagtatgcggaaccaataacggaaatcccaaatgttggaaaatagacggttcagacgacccaaaacatagaggtagaggatacgctccttatcaaaatagcaaagtaacgataatcagttacaacgaatgtgtactatctgacataaacatatcaaaagaaggaattaaacgatggagaagatttgacggaccatgtggttatgatttattcacggcggataacgtaattccaaaagatggtttacgaggagcattcgtcgataaagacggtacttatgacaaagtttacattcttttcactgatactatcggctcaaagagaattgttaaaattccgtatatagcacaaatgtgcctaaacgacgaaggtggtccatcatcattgtctagtcatagatggtcgacgtttctcaaagtcgaattagaatgtgatatcgacggaagaagttatagacaaattattcattctagaactataaaaacagataatgatacgatactatatgtattcttcgatagtccttattccaagtccgcattatgtacctattctatgaataccattaaacaatctttttctacgtcaaaattggaaggatatacaaagcaattgccgtctccagctcctggtatatgtctaccagctggaaaagttgttccacataccacgtttgaagtcatagaaaaatataatgtactagatgatattataaagcctttatctaaccaacctatcttcgaaggaccgtctggtgttaaatggttcgatataaaggagaaggaaaatgaacatcgggaatatagaatatacttcataaaagaaaattctatatattcgttcgatacaaaatctaaacaaactcgtagctcgcaagtcgatgcgcgactattttcagtaatggtaacttcgaaaccgttatttatagcagatatagggataggagtaggaatgccacaaatgaaaaaaatacttaaaatgtaatcttaatcgagtacaccacacgacaatgaacaaacataagacagattatgctggttatgcttgctgcgtaatatgcggtctaattgttggaattatttttacagcgacactattaaaagttgtagaacgtaaattagttcatacaccatcaatagataaaacgataaaagatgcatatattagagaagattgtcctactgactggataagctataataataaatgtatccatttatctactgatcgaaaaacctgggaggaaggacgtaatgcatgcaaagctctaaatccaaattcggatctaattaagatagagactccaaacgagttaagttttttaagaagcattagacgcggatattgggtaggagaatccgaaatattaaaccagacaaccccatataattttatagctaagaatgccacgaagaatggaactaaaaaacggaaatatatttgtagcacaacgaatactcccaaactgcattcgtgttacactatataacaattacactacatttttatcataccactacttcggttagatgttttagaaaaaaataaatatcgccgtaccgttcttgtttttataaaaataacaattaacaattatcaaattttttctttaatattttacgtggttgaccattcttggtggtaaaataatctcttagtgttggaatggaatgctgtttaatgtttccacactcatcgtatattttgacgtatgtagtcacatcgtttacgcaatagtcagactgtagttctatcatgcttcctacattagaaggaggaacagttttaaagtctcttggttttaatctattaccgttagttttcatgaaatcctttgttttatccacttcacattttaaataaatgtccactatacattcttttgttaattttactagatcgtcatgggtcatagaatttataggttccgtagtccatggatccaaactagcaaacttcgcgtatacggtatcgcgattagtgtatacaccaactgtatgaaaattaagaaaacagtttaataaatcaacagaaatatttaatcctccgtttgatacagatgcgccatatttatggatttcggattcacacgttgtttgtctgaggtgttcgtctagtgttgcttctacgtaaacttcgattcccatatattctttattgtcagaatcgcataccgatttatcatcatacactgtttgaaaactaaatggtatacacatcaaaataataaataataacgagtacattctgcaatattgttatcgtaattggaaaattagtgttcgagtgagtcggattatgtgagtactggattgtatattttattttatattttgtaataagaataaaatgctaatgtcaagtttattccaatagatgtcttattaaaaaacatatataataaataacaatggctgaatggcataaaattatcgaggatatctcaaaaaataataagttcgaggatgccgccatcgttgattacaagactacaaagaatgttctagctgctattcctaacagaacatttgccaagattaatccgggtgaaattattcctctcatcactaatcgtaatattctaaaacctcttattggtcagaaatattgtattgtatatactaactctctaatggatgagaacacgtatgctatggagttgcttactgggtacgcccctgtatctccgatcgttatagcgagaactcataccgcacttatatttttgatgggtaagccaacaacatccagacgtgacgtgtatagaacgtgtagagatcacgctacccgtgtacgcgcaactggtaattaaaataaaaagtaatattcatatgtagtatcaattttaaatgatgatgatgaaatggataatatccatattgacgatgtcaataatgccggtattggcatacagttcatcgatttttagatttcattcagaggatgtggaattatgttatgggcatttgtattttgataggatctataatgtagtaaatataaaatataatccgcatattccatatagatataattttattaatcgcacgttaaccgtagatgaactagacgataatgtcttttttacacatggttattttttaaaacacaaatatggttcacttaatcctagtttgattgtctcattatcaggaaacttaaaatataatgatatacaatgctcagtaaatgtatcgtgtctcattaaaaatttggcaacgagtacatctactatattaacatctaaacataagacttattctctacatcggtccacgtgtattactataataggatacgattctattatatggtataaagatataaatgacaagtataatgacatctatgattttactgcaatatgtatgctaatagcgtctacattgatagtgaccatatacgtgtttaaaaaaataaaaatgaactcttaattatgctatgctattagaaatggataaaatcaaaattacggttgattcaaaaattggtaatgttgttaccatatcgtataacttggaaaagataactattgatgttacacctaaaaagaaaaaagaaaaggatgtattattagcgcaatcagttgctgtcgaagaggcaaaagatgtcaaggtagaagaaaaaaatattatcgatattgaagatgacgatgatatggatgtagaaagcgcataatactatctataaacataagtatataataaatactttttatttacggtactcttgtagtggtgataccctactcaattatttttttaaaaaaatacttattctgattcttctagccatttccgtgttcgttcgaatgccacatcgacgttaaagataggggagtagttgaaatctagttctgcattgttggtacgcacctcaaatgtagtgttggatatcttcaacgtatagttgttgagtagtgatggttttctaaatagaattctcttcatatcattcttgcacgcgtacatttttagcatccatcttggaatcctagatccttgttctattcccaatggtttcatcaatagaagattaaacatatcgtacgaacacgatggagagtaatcgtagcaaaagtaagcatttcctttaatcttagatcccggatactggatatattttgcagccaacacgtgcatccatgcaacatttcctacatatacccggctatgcaccgcgtcatcatcgactgtacgatacataatgttaccgtgttgcttacattgctcgtaaaagactttcgtcaatttgtctccttctccgtaaattccagtgggtcttaggcaacaagtatacaattttgctccattcatgattacggaattattggctttcataaccagttgctcggccatacgtttactttttgcgtatacatgtcctggtgatatatcataaagggtatgctcatggccgatgaatggatcaccgtgtttatttggtcctattgcttccatgctactagtatagatcaaatacttgattcctaggtccacacaagctgccaatatagtctgtgttccataatagtttactttcatgatttcattatcggtgtattttccaaatacatccactagagcagccgtatgaataatcagatttaccccatctagcgcttctctcaccttatcaaagtcgtttatatcacattgtatatagtttataaccttaactttcgaggttattggttgtggatcttctacaatatctatgactctgatttcttgaacatcatctgcactaattaacagttttactatatacctgcctagaaatccggcaccaccagtaaccgcgtacacggccattgctgccactcataatatcagactacttattctattttactaaataatggctgtttgtataatagaccacgataatatcagaggagttatttactttgaaccagtccatggaaaagataaagttttaggatcagttattggattaaaatccggaacgtatagtttgataattcatcgttacggagatattagtcaaggatgtgattccataggcagtccagaaatatttatcggtaacatctttgtaaacagatatggtgtagcatatgtttatttagatacagatgtaaatatatctacaattattggaaaggcgttatctatttcaaaaaatgatcagagattagcgtgtggagttattggtatttcttacataaatgaaaagataatacattttcttacaattaacgagaatggcgtttgatatatcagttaatgcgtctaaaacaataaatgcattagtttacttttctactcagcaaaataaattagtcatacgtaatgaagttaatgatacacactacactgtcgaatttgatagggacaaagtagttgacacgtttatttcatataatagacataatgacaccatagagataagaggggtgcttccagaggaaactaatattggttgcgcggttaatacgccggttagtatgacttacttgtataataagtatagttttaaactgattttagcagaatatataagacacagaaatactatatccggcaatatttattcggcattgatgacactagatgatttggctattaaacagtatggagacattgatctattatttaatgagaaacttaaagtagactccgattcgggactatttgactttgtcaactttgtaaaggatatgatatgttgtgattctagaatagtagtagctctatctagtctagtatctaaacattgggaattgacaaataaaaagtataggtgtatggcattagccgaacatatatctgatagtattccaatatctgagctatctagactacgatacaatctatgtaagtatctacgcgggcacactgagagcatagaggatgaatttgattattttgaagacgatgattcgtctacatgttctgccgtaaccgacagggaaacggatgtataattttttttatagcgtgaaggatatgataaaaaatataattgttgtatttatcccattccaatcaccttatatgattctgtaaaaaaattatactgtaacacaatgaaggagtcttatagatgtatagaggtcagatactggtttgataaactgtttattccacataagtatgtttgactttatggttagacccgcatactttaacaaatcactgaaaattggagttaggtattgacctctcagaatcagttgccgttctggaacattaaatgtattttttatgatatactccaacgcatttatgtgggcatacaacaagtcattactaatggagtattccaagagttttagttgtctagtatttaacaagagaagagatttcaacagactgtttatgaactcgaatgccgcctcattgtcgcttatattgatgatgtcgaattctcccaatatcatcaccgatgagtagctcatcttgttatcgggatccaagttttctaaagatgtcattaaaccctcgatcatgaatggatttatcatcatcgtttttatgttggacatgagcttagtccgtttgtccacatctatagacgacgatttctgaattatttcatatatccctctctttaactccaggaacttgtcaggatggtctactttaatatgttctcgtctaagagatgaaaatctttggatggttgcacgcgacttttctctaaaggatgacgttgcccaagatcctctcttaaatgaatccatcttatccttggacaagatggacagtctattttccttagatggtttaatatttttgttacccatgatctataaaggtagacctaatcgtctcggatgaccatatatttattttcagttttattatacgcataaattgtaaaaaatatgttaggtttacaaaaatgtctcgtggggcattaatcgtttttgaaggattggacaaatctggaaaaacaacacaatgtatgaacatcatggaatcaataccttcaaacacaataaaataccttaactttcctcagagatccactgtcactggaaagatgatagatgactatctaactcgtaaaaaaacctataatgatcatatagttaatctattattttgtgcaaatagatgggagtttgcatcttttatacaagaacaactagaacagggaattactttaatagttgatagatacgcattttctggagtagcgtatgccgccgctaaaggcgcgtcaatgactctcagtaagagttatgaatctggattgcctaaacccgacttagttatattcttggaatctggtagcaaagaaattaatagaaacgtcggcgaggaaatttatgaagatgttacattccaacaaaaggtattacaagaatataaaaaaatgattgaagaaggagatattcattggcaaattatttcttctgaattcgaggaagatgtaaagaaggagttgattaagaatatagttatagaggctatacacacggttactggaccagtggggcaactgtggatgtaatagtgaaattacattttttataaatagatgttagtacagtgttataaatggatgaagcatattactctggcaacttggaatcagtactcggatacgtgtccgatatgcataccgaactcgcatcaatatctcaattagttattgccaagatagaaactatagataatgatatattaaacaaggacattgtaaattttatcatgtgtagatcaaacttggataatccatttatctctttcctagatactgtatatactattatagatcaagagatctatcagactgagttgattaattcattagacgacaatgaaattatcgattgtatagttaataagtttatgagcttttataaggataacctagaaaatatagtagatgctatcatcactctaaaatatataatgaataatccagattttaaaactacgtatgcagaagtactcggttccagaatagcggatatagatattaaacaagtgatacgtgagaatatactacaattgtctaatgatatccgcgaacgatatttgtgaaaaatattaaaaaaaaatactttttttattaaatgacgtcgcttcgcgaatttagaaaattatgctgtgatatatatcacgcatcaggatataaagaaaaatctaaattaattagagactttataacagatagggatgataaatatttgatcattaagctattgcttcccggattagacgatagaatttataacatgaacgataaacaaattataaaattatatagtataatatttaaacaatctcaggaagatatgctacaagatttaggatacggatatataggagacactattaggactttcttcaaagagaacacagaaatccgtccacgagataaaagcattttaactttagaagaagtggatagttttttaactacgttatcatccgtaactaaagaatcgcatcaaataaaattattgactgatatcgcatccgtttgtacatgtaatgatttaaaatgtgtagtcatgcttattgataaagatctaaaaattaaagcgggtcctcggtacgtacttaacgctattagtcctaatgcctatgatgtgtttagaaaatctaataacttgaaagagataatagaaaattcatctaaacaaaatctagactctatatctatttctgttatgactccaattaatcccatgttagcggaatcgtgtgattctgtcaataaggcgtttaaaaaatttccatcaggaatgtttgcggaagttaaatacgatggtgaaagagtacaagttcataaaaataataacgagtttgccttctttagtagaaacatgaaaccagtactctctcataaagtggattatctcaaagaatacataccgaaagcatttaaaaaagctacgtctatcgtattggattctgaaattgttcttgtagacgaacataatgtaccgctcccgtttggaagtttaggaatacacaaaaagaaagaatataaaaactctaacatgtgtttgttcgtgtttgactgtttgtactttgatggattcgatatgacggacattccattgtacgaacgaagatcttttctcaaagatgttatggttgaaatacccaatagaatagtattctcagagttgacgaatattagtaacgagtctcagttaactgacgtattggatgatgcactaacgagaaaattagaaggattggtcttaaaagatattaatggagtatacgaaccgggaaagagaagatggttaaaaataaagcgagactatttgaacgagggttccatggcagattctgccgatttagtagtactaggtgcttactatggtaaaggagcaaagggtggtatcatggcagtctttctaatgggttgttacgacgatgaatccggtaaatggaagacggtaactaaatgttccggtcacgatgataatacgttaagggagttgcaagaccaattaacgatgattaaaattaacaaggatcccaaaaaaattccagagtggttagtagttaataaaatctatattcccgattttgtagtagaggatccgaaacaatctcagatatgggaaatttcaggagcagagtttacatcttccaagtcacatacagcgaatggaatatcgattagatttcctagatttactaggattagagaagataaaacgtggaaagaatctactcatctaaacgatttagtaaacttgactaaatcttaatagttacatacaaattaaaataacactatttagttggtggtcgccatggatggtgttattgtatactgtctaaacgcgctagtaaaacatggcgaggaaataaatcatataaaaaatgatttcatgattaaaccatgttgtgaaagagtttgtgaaaaagttaagaacgttcacatcgacggacaatctaaaaacaatacagtgattgcagatttgccatatctggataatgctgtatcggatgtatgcaaatcgatatatatatatatatagtatcaagaatatccagatttgctaatttgataaagatagatgacgatgacaagactcctactggtgtatataattattttaaacctaaagatgccattcctgttattatatccataggaaaggatagagatgtttgtgaactattaatctcatctgataaagcgtgtgcgtgtatagagttaaattcatatcacgtagccattcttcccatgaatgtttccttttttaccaaaggaaatgcctcgttgattattctcctgtttgatttctctatcgatgcagcacctctcttaagaagtgtaaccgataataatgttattatatctagacactagcgtctacatgacgagcttccgagttccaattggttcaagttttacataagtataaagtccgactattgttctatattatatatggttgttgatggatctgtgatgcatgcgatagctgataatagaacttacgcaaatattagcaaaaatatattagacaatactacaattaacgatgagtgtagatgctgttattttgaaccacagattaggattcttgatagagatgagatgctcaatggatcatcgtgtgatatgaacagacattgtattatgatgaatttacctgatgtaggcaaatttggatctagtatgttggggaaatatgaacctgacatgattaagattgctctttcggtggctggtaatttaataagaaatcgagactacattcccgggagacgaggatatagctactacgtttacggtatagcctctagataatttttttaagcacgaaataaaaaacataattttaaaccaatctatttcatactattttgtgtgatcaccatggacataaagatagatattagtatttctggtgataaatttacggtgactactaggagggaaaatgaagaaagaaaaaaatatctacctctccaaaaagaaaaaactactgatgttatcaaacctgattatcttgagtacgatgacttgttagatagagatgagatgtctactattctagaggaatattttatgtacagaggtctattaggcctcagaataaaatatggacgactctttaacgaaattaaaaaattcgacaatgatgcggaagaacaattcggtactatagaagaactcaagcagaaacttagattaaattctgaagagggagcagataactttatagattatataaaggtacaaaaacaggatatcgtcaaacttactgtatacgattgcatatctatgataggattgtgtgcatgcgtggtagatgtttggagaaatgagaaactgttttctagatggaaatattgtttacgagctattaaactgtttattaatgatcacatgcttgataagataaaatctatactgcagaatagactagtatatgtggaaatgtcatagaaagttaatgagagcaaaaatatataaggttgtattccatatttgttattttttctgtaatagttaaaaaaatacattcgatggtctatctatcagattattatgtgttataaggtactttttctcataataaactagagtatgagtaagatagtgtttttcaaaacatataaatctaaaattgatggatgagatatacagctattaatttcgaaaatatataaatctaaaattgatggataagatatacagctattaatttcgaaaatatattttaatctgataactttaaacatggatttttgatggtggtttaacgttttaaaaaaagattttgttattgtagtatatgataatattaaaagatggatataaagaatttgctgactgcatgtactattttttacattactacattggctacggcagatatacctactccgccaccacacgctccggtaaacgggtcatgtgacaagggagaatatcttgataagaggcataatcaatgttgtaatcggtgtccacctggagaatttgccaaggttagatgtagtggtagtgataacacaaaatgtgaacgctgcccacctcatacatataccacaatcccaattattctaatggatgtcatcaatgtagaaaatgcccaacaggatcatttgataaggtaaagtgtaccggaacacagaacagtaaatgttcgtgtcttcctggttggtattgcgctactgattcttcacagactgaagattgttgaaattgtgtaccaaaaaggagatgtccatgcggatactttggtggaatagatgaacaaggaaatcctatttgtaaatcgtgctgtattggtgaatattgcaactacctacgtaattatagacttgatccattttctccatgcaaactatctaaatgtaattaattatgattttgatgataatgttaccatacattatatcgctacttggttagtgtattattcagtatgaagacctattaataattacttatcttttgacgatcttgttataattataatataaaaacttatggcatagtaacttataattgctaacacgataaattcgtaataatctgttttgttcaaaggaatctacaggcataaaaataaaaatataatttataatatactcttacagcgcgccatcatgaataacagcagtgaattgattgctgttattaatggatttagaaatagtggacgattttgtgatattagtatagttattaatgatgaaatgataaacgctcacagactcatcctatctggagcctccgaatatttttccattctgttttccaataattttatcgattctaatgaatacgaagttaatctaagtcatttagattatcaaagtgttaacgatttgatcgattacatttatgggatacctttgagcctaactaacgataacgtgaaatatattctttcaaccgctgattttttacaaattggatctgccattactgagtgcgaaaaatacatacttaaaaatctttgttctagaaactgtatcgatttctacatatacgctgataaatataataacaagaaaatagaatcagcgtcgtttaacacaatattacaaaatattttgaaactcatcaacgatgaaaactttaaatacttaacagaggaatcaatgataaaaattttaagcgatgatatgttaaatataaaaaatgaggatttcgccccactaattctcattaaatggttagagagtactcaacaatcatgcaccgtcgagttacttagatgcctcagaatatcattgctttccccacaagttataaaatcactttatagtcatcaactggttagttcaatctacgaatgtataacattcttaaacaatatagcattcttggatgaatcatttcctagataccatagcatcgagttgatatctatcggtataagtaattcgcatgataagatttccataaactgctacaatcataaaaaaaatacatgggaaatgatatcttcacgtagatataggtgtagtttcgcagtggccgtcctggataatattatttatatgatgggtggatatgatcagtccccgtatagaagttcaaaggttatagcgtacaatacatgtacaaattcttggatatatgatataccagagctaaaatatcctcgttctaattgtgggggactggctgatgacgaatacatttattgtataggcggcatacgcgatcaggattcatcgttgacatctagtattgataaatggaagccatcaaaaccatattggtagaagtatgctaaaatgcgcgaaccaaaatgtgatatgggggttgcgatgttaaacggattaatatatgtcatgggtggaatcgttaaaggtgacacgtgtaccgacgcactagagagtttatcagaagatggatggatgaagcatcaacgtcttccaataaaaatgtccaatatgtcgacgattgttcatgatggcaagatttatatatctggaggttacaacaatagtagtgtagttaatgtaatatcgaatctagtccttagctataatccgatatatgatgaatggaccaaattatcatcattaaacattcctagaattaatcccgctctatggtcagcgcataataaattatatgtaggaggaggaatatctgatgatgttcgaactaatacatctgaaacatacgataaagaaaaagattgttggacattggataatggtcacgtgttaccacgcaattatataatgtataaatgcgaaccgattaaacataaatatccattggaaaaaacacagtacacgaatgattttctaaagtatttggaaagttttataggtagttgatagaacaaaatacataattttgtaaaaataaatcactttttatactaatatgacacgattaccaatacttttgttactaatatcattagtatactctacaccttctcctcagacatctaaaaaataggtgatgatgcaactctatcatgtaatcgaaataatacaaatgactacgttgttatgagtgcttggtataaggagcccaattccattattcttttagctgctaaaagcgacgtcttgtattttgataattataccaaggataaaatatcttacgactctccatacgatgatctagttacaactatcacaattaaatcattgactgctagagatgccggtacttatgtatgtgcattctttatgacatcgcctacaaatgacactgataaagtagattatgaagaatactccacagagttgattgtaaatacagatagtgaatcgactatagacataatactatctggatctacacattcaccagaaactagttctgagaaaccagaggatatagataattttaattgctcgtcggtattcgaaatcgcgactccggaaccaattactgataatgtagaagatcatacagacaccgtcacatacactagtgatagcattaatacagtaagtgcaacatctggagaatccacaacagacgagactccggaaccaattactgataaagaagatcatacagttacagacactgtctcatacactacagtaagtacatcatctggaattgtcactactaaatcaaccaccgatgatgcggatctttatgatacgtacaatgatacagtaccatcaactactgtaggtagtagtacaacctctattagtaattataaaaccaaggactttgtagaaatatttggtattaccgcattaattatattgtcggccgtggcaatattctgtattacgtattatatatgtaataaacgttcacgtaaatacaaaacagagaacaaagtctagatttttgacttacataaatgtctgggatagtaaaatctatcatattgagcggaccatctggtttaggaaagacagccatagccaaaagactatgggaatatatttggatttgtggtgtcccataccactagatttcctcgtcctatggaacgagaaggtgtcgattaccattacgttaacagagaggccatctggaagggaatagccgccggaaactttctagaacatactgagtttttaggaaatatttacggaacttctaaaactgctgtgaatacagcggctattaataatcgtatttgtgtgatggatctaaacatcgatggcgttagaagtcttaaaaatacgtacctaatgccttactcggtgtatataagacctacctctcttaaaatggttgagaccaagcttcgtcgtagaaacactgaagcggatgatgagattcatcgtcgtgtgatgttggcaaaaactgacatggatgaggcaggtgaagccggtctattcgacactattatcattgaagatgatgtgaatttagcatatagtaagttaattcagatactacaggaccgtattagaatgtattttaacactaattaaagacttaagacttaaaacttgataattaataatataactcgtttttatatgtggctatttcaacgtctaatgtattagttaaatattaaaacttaccacgtaaaacttaaaatttaaaatgatatttcattgacagatagatcacacattatgaactttcaaggacttgtgttaactgacaattgcaaaaatcaatgggtcgttggaccattaataggaaaaggtggattcggtagtatttatactactaatgacaataattatgtagtaaaaatagagcccaaagctaacggatcattatttaccgaacaggcattttatactagagtacttaaaccatccgttatcgaagaatggaaaaaatctcacaatataaagcacgtaggtcttatcacgtgcaaggcatttggtctatacaaatccattaatgtggaatatagattcttggtaattaatagattaggtgcagatctagatgcggtgatcagagccaataataatagattaccaaaaaggtcggtgatgttgatcggaatcgaaatcttaaataccatacaatttatgcacgagcaaggatattctcacggagatattaaagcgagtaatatagtcttggatcaaatagataagaataaattatatctagtggattacggattggtttctaaattcatgtctaatggcgaacatgttccatttataagaaatccaaataaaatggataacggtactctagaatttacacctatagattcgcataaaggatacgttgtatctagacgtggagatctagaaacacttggatattgtatgattagatggttgggaggtatcttgccatggactaagatatctgaaacaaagaattgtgcattagtaagtgccacaaaacagaaatatgttaacaatactgcgactttgttaatgaccagtttgcaatatgcacctagagaattgctgcaatatattaccatggtaaactctttgacatattttgaggaacccaattacgacgagtttcggcacatattaatgcagggtgtatattattaagtgtggtgtttggttgatgtaaaatttttgttgataaaaattaaaaaaataacttaatttattattgatctcgtgtgtacaaccgaaatcatggcgatgttttacgcacacgctctcggtgggtacgacgagaatcttcatgcctttcctggaatatcatcgactgttgccaatgatgtcaggaaatattctgttgtgtcagtttataataacaagtatgacattgtaaaagacaaatatatgtggtgttacagtcaggtgaacaagagatatattggagcactgctgcctatgtttgagtgcaatgaatatctacaaattggagatccgatccatgatcaagaaggaaatcaaatttctatcatcacataccgccacaaaaactactatgctctaagcggaatcgggtacgagagtctagacttgtgtttggaaggagtagggattcatcatcacacacttgaagcaggaaacgctgtatatggaaaagttcaacatgattattctactatcaaagagaaggccaaagaaatgagtacacttagtccaggacctataattgattaccacgtctggataggagattgtatctgtcaagttactgctgtggacgtacatggaaaggaaattatgagaatgagattcaaaaagggtgcggtgcttccgatcccaaatctggtaaaagttaaacttggggagaatgatacagaaaatctttcttctactatatcggcggcaccatcgaggtaaccacctctctggaagacagcgtgaataatgtactcatgaaacgtttggaaactatacgccatatgtggtctgttgtatatgatcattttgatattgtgaatggtaaagaatgctgttatgtgcatacgcatttgtctaatcaaaatcttataccgagtactgtaaaaacaaatttgtacatgaagactatgggatcatgcattcaaatggattccatggaagctctagagtatcttagcgaactgaaggaatcaggtggatggagtcccagaccagaaatgcaggaatttgaatatccagatggagtggaagacactgaatcaattgagagattggtagaggagttcttcaatagatcagaacttcaggctggtaaattagtcaaatttggtaattctattaattgttaaacatacatctgtttcagctaagcaactaagaacacgtatacggcagcagcttccttttatactctcatcttttaccaacacaaagggtggatatttgttcattggagttgataataatacacacaaagtatttggattcacggtgggttacgactacctcagactgatagagaatgatatagaaaagcatatcaaaagactttgtgttgtgcatttctgtgagaagaaagaggacatcaagtacacgtgtcgattcatcaaggtatataaacctggggatgaggctacctcgacatacgtgtgcgctatcaaagtggaaagatgctgttgtgctgtgtttgcagattggccagaatcatggtatatggatactaatggtatcaataagtattctccagatgaatgggtgtcacatataaaattttaattaatgtaatagagaacaaataataaggttgtaatatcatatagacaataactaacaattaattagtaactgttatctcttttttaactaaccaactaactatatacctattaatacatcgtaattatagttcttaacatctattaatcattaattcgcttctttaattttttataaactaacattgttaattgaaaagggataacatgttacagaatataaattatatatggatttttttaaaaaggaaatacttgactggagtatatatttatctcttcattatatagcacgcgtgtgttccaatttttccacatcccatataatacaggattataatctcgttcgaacatacgagaaagtggataaaacaatagttgattttttatctaggttgccaaatttattccatattttagaatatggggaaaatattctacatatttattctatggatgatgctaatacgaatattataattttttttctagatagagtattaaatattaataagaacgggtcatttatacacaatctcgggttatcatcatccattaatataaaagaatatgtatatcaattagttaataatgatcatccagataataggataagactaatgcttgaaaatggacgtagaacaagacattttttgtcctatatatcagatacagttaatatctatatatgtattttaataaatcatggattttatatagatgccgaagacagttacggttgtacattattacatagatgtatatatcactataagaaatcagaatcagaatcatacaatgaattaattaagatattgttaaataatggatccgatgtagataaaaaagatacgtacggaaacacaccttttatcctattatgtaaacacgatatcaacaacgtggaattgtttgagatatgtttagagaatgctaatatagactctgtagactttaatagatatacacctcttcattatgtctcatgtcgtaataaatatgattttgtaaagttattaatttctaaaggagcaaatgttaatgcgcgtaataaattcggaactactccattttattgtggaattatacacggtatctcgcttataaaactatatttggaatcagacacagagttagaaatagataatgaacatatagttcgtcatttaataatttttgatgctgttgaatctttagattatctattatccagaggagttattgatattaactatcgtactatatacaacgaaacatctatttacgacgctgtcagttataatgcgtataatacgttggtctatctattaaacaaaaatggtgattttgagacgattactactagtggatgtacatgtatttcggaagcagtcgcaaacaacaacaaaataataatggaagtactattgtctaaacgaccatctttgaaaattatgatacagtctatgatagcaattactaaacataaacagcataatgcagatttattgaaaatgtgtataaaatatactgcgtgtatgaccgattatgatactcttatagatgtacagtcgctacagcaatataaatggtatattttaagatgtttcgatgaaatagatatcatgaagagatgttatataaaaaataaaactgtattccaattagttttttgtatcaaagacattaatactttaatgagatacggtaaacatccttctttcgtgaaatgcactagtctcgacgtatacggaagtcgtgtacgtaatatcatagcatctattagatatcgtcagagattaattagtctattatccaagaagctggatcctggagataaatggtcgtgttttcctaacgaaataaaatataaaatattggaaaactttaacgataacgaactgtccacatatctaaaaatcttataaacattattaaaatataaaatctaagtaggataaaatcacactacatcattgtttccttttagtgctcgacagtgtatactatttttaacactcataaataaaaatgaaaacgatttccgttgttacgttgttatgcgtactacctgctgttgtttattcaacatgtactgtacccactatgaataacgctaaattaacgtctaccgaaacatcgtttaatgataaacagaaagttacatttacatgtgatcagggatatcattctttggatccaaatgctgtctgtgaaacagataaatggaaatacgaaaatccatgcaagaaaatgtgcacagtttctgattatgtctctgaattatatgataagccattatacgaagtgaattccaccatgacactaagttgcaacggcgaaacaaaatattttcgttgcgaagaaaaaaatggaaatacttcttggaatgatactgttacgtgtcctaatgcggaatgtcaacctcttcaattagaacacggatcgtgtcaaccagttaaagaaaaatactcatttggggaatatataactatcaactgtgatgttggatatgaggttattggtgctttgtacataagttgtacagctaattcttggaatgttattccatcatgtcaacaaaaatgtgatatgccgtctctatctaacggattaatttccggatctacattttctatcggtggcgttatacatcttagttgtaaaagtggttttatactaacgggatctccatcatccacatgtatcgacggtaaatggaatcccatactcccaacatgtgtacgatctaacgaaaaatttgatccagtggatgatggtcccgacgatgagacagatttgagcaaactctcgaaagacgttgtacaatatgaacaagaaatagaatcgttagaagcaacttatcatataatcatagtggcgttaacaattatgggcgtcatatttttaatctccgttatagtattagtttgttcctgtgacaaaaataatgaccaatataagttccataaattgctaccgtaaatataaatccgttaaaataattaataattaataacgaacaagtatcaaaagattaaagaattatagctagaatcaattgagatgtcttcttcagtggatgttgatatctacgatgccgttagagcatttttactcaggcactattataacaagagatttattgtgtatggaagaagtaacgccatattacataatatatacaggctatttacaagatgcgccgttataccgttcgatgatatagtacgtactatgccaaatgaatcacgtgttaaacaatgggtgatggatacacttaatggtataatgatgaatgaacgcgatattactgtatgtgtgggcaccggaatactattcatggaaatgtttttcgattacaataaaaatagtatcaacaatcaactaatgtatgatataattaatagcgtatctataattctagctaatgagagatatagaagcgcttttaacgacgatggtatatacatccgtagaaatatgattaacaagttgtacggatacgcatctctaactactattggcacgatcgctggaggtgtttgttattatctgttgatgcatctagttagtttgtataaataattatttcaatatactagttaaaattttaagattttaaatgtataaaaaactaataacgtttttatttgtaataggtgcagtagcatcctattcgaataatgagtacactccgtttaataaactgagtgtaaaactctatatagatggagtagataatatagaaaattcatatactgatgataataatgaattggtgttaaattttaaagagtacacaatttctattattacagagtcatgcgacgtcggatttgattccatagatatagatgttataaacgactataaaattattgatatgtataccattgactcgtctactattcaacgcagaggtcacacgtgtagaatatctaccaaattatcatgccattatgataagtacccttatattcacaaatatgatggtgatgagcgacaatattctattactgcagagggaaaatgctataaaggaataaaatatgaaataagtatgatcaacgatgatactctattgagaaaacatactcttaaaattggatctacttatatatttgatcgtcatggacatagtaatacatattattcaaaatatgatttttaaaaatttaaaatatattatcacttcagtgacagtagtcaaataacaaacaacaccatgagatatattataattctcgcagttttgttcattaatagtatacatgctaaaataactagttataagtttgaatccgtcaattttgattccaaaattgaatggactggggatggtctatacaatatatcccttaaaaattatggcatcaagacgtggcaaacaatgtatacaaatgtaccagaaggaacatacgacatatccgcatttccaaagaatgatttcgtatctttctgggttaaatttgaacaaggcgattataaagtggaagagtattgtacgggactatgcgtcgaagtaaaaattggaccaccgactgtaacattaactgaatacgacgaccatatcaatttgtacatcgagcatccgtatgctactagaggtagcaaaaagattcctatttacaaacgcggtgacatgtgtgatatctacttgttgtatacggctaacttcacattcggagattctaaagaaccagtaccatatgatatcgatgactacgattgcacgtctacaggttgcagcatagactttgtcacaacagaaaaagtgtgcgtgacagcacagggagccacagaagggtttctcgaaaaaattactccatggagttcggaagtatgtctgacacctaaaaagagtgtatatacatgcgcaattagatccaaagaagatgttcccaatttcaaggacaaaatggccagagttatcaagagaaaatttaataaacagtctcaatcttatttaactaaatttctcggtagcacatcaaatgatgttaccacttttcttagcatgcttaacttgactaaatattcataactaatttttattaatgatacaaaaacgaaataaaactgcatattatacactggttaacgcccttataggctctaaccattttcaagatgaggtccctgattatagtccttctgttcccctctatcatctactccatgtctattagacgatgtgagaagactgaagaggaaacatggggattgaaaatagggttgtgtataattgccaaagatttttatcccgaaagaactgattgcagtgttcatctcccaactgcaagtgaaggattgataactgaaggcaatggattcagggatatacgaaacaccgataaattataaaaaaagcaatgtgtccgctgtttccgttaataatactattttcgtaactggcggattattcataaataactctaatagcacgatcgtggttaacaatatggaaaaacttgacatttataaagacaaacaatggtcgattatagaaatgcctatggctagggtatatcacggcatcgactcgacatttggaatgttatattttgccggaggtctatccgttaccgaacaatatggtaatttagagaaaaacaacgagatatcttgttacaatcctagaacgaataagtggtttgatatttcatatactatttataagatatccatatcatcattgtgtaaactaaataacgtcttctatgtatttagtaaggacattggatatgtggaaaagtatgatggtgcatggaagttagtacatgatcgtctccccgctataaaggcattatcaacttctccttattgattgaaaatgaaaatataaatagtttttatgtatagcagtattaccctatagttttattgcttactactaacatggatacagatgttacaaatgtagaagatatcataaatgaaatagatagagagaaagaagaaatactaaaaaatgtagaaattgaaaataataaaaacattaacaagaatcatcccaatgaatatattagagaagcactcgttattaataccagtagtaatagtgattccattgataaagaagttatagaatgtatctgtcacgatgtaggaatatagatcatatctactaatttttataatcaatacaaaacataaaaaacaactcgttattacatagcaggcatggaatccttcaagtattgttttgataacgatggcaagaaatggattatcggaaatactttatattctggtaattcaatactatataaggtcagaaaaaatttcactagttcgttctacaattacgtaatgaagatagatcacaaatcacacaagccattgttgtctgaaatacgattctatatatctgtattggatcctttgactatcgacaactggacacgggaacgtggtataaagtatttggctattccagatctgtatggaattggagaaaccgatgattatatgttcttcgttataaagaatttgggaagagtattcgccccaaaggatactgaatcagtcttcgaagcatgcgtcactatgataaacacgttagagtttatacactctcgaggatttacccatggaaaaatagaaccgaggaatatactgattagaaataaacgtctttcactaattgactattctagaactaacaaactatacaagagtggaaactcacatatagattacaacgaggacatgataacttcaggaaatatcaattatatgtgtgtagacaatcatcttggagcaacagtttcaaaacgaggagatttagaaatgttgggatattgcatgatagaatggttcggtggcaaacttccatggaaaaacgaaagtagtataaaagtaataaaacaaaaaaaagaatataaaaaatttatagctactttctttgaggactgttttcctgaaggaaatgaacctctggaattagttagatatatagaattagtatacacgttagattattctcaaactcctaattatgacagactacgtaaactgtttatacaagattgaaattatattctttttttatagagtgtggtagtgttacggatatctaatattaatattagactatctctatcgcgctacacgaccaatatcgattactatggatatcttcagggaaatcgcatcttctatgaaaggagagaatgtattcatttctccagcgtcaatctcgtcagtattgacaatactgtattatggagctaatggatccactgctgaacagctatcaaaatatgtagaaacggaggagaacacggataaggttagcgctcaaaatatctcattcaaatccatgaataaagtatatgggcgatattctgccgtgtttaaagattcctttttgagaaaaattggcgataagtttcaaactgttgacttcactgattgtcgcactatagatgcaatcaacaagtgtgtagatatctttactgaggggaaaatcaatccactattggatgaaccattgtctcctagcaattagtgccgtatactttaaagcaaaatggttgacgccattcgaaaaggaatttaccagtgattatcccttttacgtatctccgacggaaatggtagatgtaagtatgatgtctatgtacggcaaggcatttaatcacgcatctgtaaaggaatcattcggcaacttttcaatcatagaactgccatatgttggagatactagtatgatggtcattcttccagacaagattgatggattagaatccatagaacaaaatctaacagatacaaattttaagaaatggtgtaactctctggaagctacgtttatcgatgttcacattcccaagtttaaggtaacaggctcgtataatctggtggatactctagtaaagtcaggactgacagaggtgttcggttcaactggagattatagcaatatgtgtaattcagatgtgagtgtcgacgctatgatccacaaaacgtatatagatgtcaatgaagagtatacagaagcagctgcagcaacttgtgcactggtgtcagactgtgcatcaacaattacaaatgagttctgtgtagatcatccgttcatctatgtgattaggcatgttgatggaaaaattcttttcgttggtagatattgctctccgacaactaattgttaaccattttttttaaaaaatagaaaaaacatgtggtattagtgcaggtcgttattcttccaattgcaattggtaagatgacggccaactttagtacccacgtcttttcaccacagcactgtggatgtgacagactgaccagtattgatgacgtcagacaatgtttgactgaatatatttattggtcgtcctatgcataccgcaacaggcaatgcgctggacaattgtattccacactcctctcttttagagatgatgcggaattagtgttcatcgacattcgcgagctggtaaaaaatatgccgtgggatgatgtcaaagattgtgcagaaatcatccgttgttatataccggatgagcaaaaaaccatcagagagatttcggccatcatcggactttgtgcatatgctgctacttactggggaggtgaagaccatcccactagtaacagtctgaacgcattgtttgtgatgcttgagatgctaaattacgtggattataacatcatattccggcgtatgaattgatgagttgtacatcttgacattttcttctttcttctcttctccctttcccagaaacaaacttttttacccactataaaataaaatgagtatactacctgttatatttctttctatatttttttattcttcattcgttcagacttttaacgcgtctgaatgtatcgacaaagggcaatattttgcatcattcatggagttagaaaacgagccagtaatcttaccatgtcctcaaataaatacgctatcatccggatataatatattagatattttatgggaaaaacgaggagcggataatgatagaattataccgatagataatggtagcaatatgctaattctgaacccgacacaatcagactctggtatttatatatgcattaccacgaacgaaacctactgtgacatgatgtcgttaaatttgacaatcgtgtctgtctcagaatcaaatatagattttatctcgtatccacaaatagtaaatgagagatctactggcgaaatggtatgtcccaatattaatgcatttattgctagtaacgtaaacgcagatattatatggagcgggcatcgacgccttagaaataagagacttaaacaacggacacctggaattattaccatagaagatgttagaaaaaatgatgctggttattatacatgtgttttagaatatatatacggtggcaaaacatataacgtaaccagaattgtaaaattagaggtacgggatagaataatacatcctactatgcaattaccagatggcattgtaacttcaataggtagtaatttgactattgcatgcagagtatcgttgagacctcccacaacggatgcagacgtcttttggataagtaatggtatgtattacgaagaagatgatggggacggaaacggtagaataagtgtagcaaataaaatctatatgaccgataagagacgtgttattacatcccggttaaacattaatcctgtcaaggaagaagatgctacaacgtttacgtgtatggcgtttactattcctagcatcagtaaaacagttactgttagtataacgtgaatgtatgttgttacatttccatgtcaattgagtttataagaatttttatacattatcttccaacaagcaattgacgaacgtattgctatgattaactcccacgatactatgcatattattaatcattaacttgcagactatacctagagctattttgacatactcgtgttcttgtgtaattgcagtatctatattattaaagtacgtaaatctagctatagttttattatttaattttagataatataccgtctccttatttttaaaaattgccacatcctttattaaatcatgaatgggaatttctatgtcatagttaatatattgtgaacaacaagagcagatatctataggaaagggtggaatgcgatacattgatctatgtagttttaaaacacacgcaaactttgaagaatttatataaatcattccatcgatacatccttctatgttgagatgtatatatccaggaattcgtttattaatatcgggaaatgtataaactaaaacattgcccggaagcggagcttctaccggagttatatcagtttttaacttacaaaatgtaaccaatacctttgcatgacttgttttgttcggcaacgttagtttaaacttgacgaatggattaattacaatagcatgatccgcgcatctattaagtttttttactttaacgcccttgtatgtttttacagagactttatctaaatttctagtgcttgtatgtgttataaatataacgggatatagaactgaatcacctaccttagatacccaattacattttatcagatccagataataaacaaattttgtcgccctaactaattctatattgttatatattttacaattggttatgatatcatgtaataacttggagtctaacgcgcatcgtcgtacgtttatacaattgtgatttagtgtagtatatctacacatgtatttttccgcactatagtattctggactagtgataaaactatcgttatatctgtcttcaatgaactcatcgagatattgctctctgtcatattcatacacctgcataaactttctagacatcttacaatccgtgttattttaggatcatatttacatatttacgggtatatcaaagatgttagattagttaatgggaatcgtctataataatgaatattaaacaattatatgaggacttttaccacaaagcatcataaaaatgagtcgtcgtctgatttatgttttaaatatcaaccgcgaatcaactcataaaatacaagagaatgaaatatatacatattttagtcattgcaatatagaccatacttctacagaacttgattttgtagttaaaaactatgatctaaacagacgacaacctgtaactgggtatactgcactacactgctatttgtataataattactttacaaacgatgtactgaagatattattaaatcatggagtggatgtaacgatgaaaaccagtagcggacgtatgcctgtttatatattgcttactagatgttgcaatatttcacatgatgtagtgatagatatgatagacaaagataaaaaccacttattacatagagactattccaacctattactagagtatataaaatctcgttacatgttattaaaggaagaggatatcgatgagaacatagtatccactttattagataagggaatcgatcctaactttaaacaagacggatatacagcgttacattattattatttgtgtctcgcacacgtttataaaccaggtgagtgtagaaaaccgataacgataaaaaaggccaagcgaattatttctttgtttatacaacatggagctaatctaaacgcgttagataattgtggtaatacaccattccatttgtatcttagtattgaaatgtgtaataatattcatatgactaaaatgctgttgacttttaatccgaatttcgaaatatgtaataatcatggattaacgcctatactatgttatataacttccgactacatacaacacgatattcttgttatgttaatacatcactatgaaacaaatgttggagaaatgccgatagatgagcgtcgtatgatcgtattcgagtttatcaaaacatattctacacgtcctgcagattcgataacttatttgatgaataggtttaaaaatatagatatttatacccgctatgaaggaaagacattattacacgtagcatgtgaatataataatacacacgtaatagattatcttatacgtatcaacggagatataaatgcgttaaccgacaataacaaacacgctacacaactcattatagataacaaagaaaattccccatataccattaattgtttactgtatatacttagatatattgtagataagaatgtgataagatcgttggtggatcaacttccatctctacctatcttcgatataaaatcatttgagaaattcatatcctactgtatacttttagatgacacattttacaatagacacgttaggaatcgcgattctaaaacgtatcgatacgcattttcaaaatacatgtcgtttgataaatacgatggtataataactaaatgtcataaagaaacaatattgctcaaactatccactgttctagacactacactatatgcagttttaagatgccataattcgaaaaagttaagaagatacctcaccgagttaaaaaaatataataacgataagtcctttaaaatatattctaatattatgaatgagagataccttaatgtatattataaagatatgtacgtgtcaaaggtatatgataaactatttcctgttttcacagataaaaattgtctactaacattactaccttcagaaattatatacgaaatattatacatgctgacaattaacgatctttataatatatcgtatccacctaccaaagtatagttgtatttttctcatgcgatgtgtgtaaaaaaactgatattatataaatattttagtgccgtataataaagatgacgatgaaaatgatggtacatatatatttcgtatcattatcattattgttattgctattccacagttacgccatagacatcgaaaatgaaatcacagaattcttcaataaaatgagagatactctaccagctaaagactctaaatggttgaatccagcatgtatgttcggaggcacaatgaatgatatagccgctctaggagagccattcagcgcaaagtgtcctcctattgaagacagtcttttatcgcacagatataaagactatgtggttaaatgggaaaggctagaaaaaaatagacggcgacaggtttctaataaacgtgttaaacatggtgatttatggatagccaactatacatctaaattcagtaaccgtaggtatttgtgcaccgtaactacaaagaatggtgactgtgttcagggtatagttagatctcatattagaaaacctccttcatgcattccaaaaacatatgaactaggtactcatgataagtatggcatagacttatactgtggaattctttacgcaaaacattataataatataacttggtataaagataataaggaaattaatatcgacgacattaagtattcacaaacgggaaaggaattaattattcataatccagagttagaagatagcggaagatacgactgttacgttcattacgacgacgttagaatcaagaatgatatcgtagtatcaagatgtaaaatacttacggttataccgtcacaagaccacaggtttaaactaatactagatccaaaaatcaacgtaacgataggagaacctgccaatataacatgcactgctgtgtcaacgtcattattgattgacgatgtactgattgaatgggaaaatccatccggatggcttataggattcgattttgatgtatactctgttttaactagtagaggcggtattaccgaggcgaccttgtactttgaaaatgttactgaagaatatataggtaatacatataaatgtcgtggacacaactattattttgaaaaaacccttacaactacagtagtattggagtaaatatacaatgcatttttatatacattactgaataattattattattatttatatcgtatttgtgctataacgcgactatctaggtatttgtatctcactgatagagaacatataaatatagactctattaaacagttgtgtaaaatatcaaatcctaatagatgtggatgtacggctttacatgagtacttttataattatagatcagtcaacggaaaatacaagtatagatacaacggttactatcaatattattcatctagcgattatgaaaattataatgaatattattatgatgattatgatagaactggtatgaacagcgagagcgatagtgagagtgataatatatcaatcaaaacagaatatgagaatgaatatgaattctatgatgaaacacaagatcaaagtacacaactagtaggttacgacattaaactcaaaaccaatgaggatgattttatggctatgatagatcagtgggtgtccatgattatatagatgaatcaattaataaagtagtatatggaagagagtctcacgtaagatggcgggatatatggcaagaacataatgatggcgtatacagtataggaaaggagtgcatagataatatatacgaagacaaccataccgtagacgaattctacaagatagacagcgtatcagatgtagatgacgcggaacacatatctccgataactaatgatgtatctacacaaacatgggaaaagaaatcagagttagatagatacatggaaatgtatcctcgtcatagatatagtaagcattctgtctttaagggattttctgacaaagttagaaaaaatgatttagacatgaatgtggtaaaagaattactttctaacggtgcatctctaacaattaaggatagcagtaataaggatccaataaccgtttattttcgaagaacgataatgaatttagaaatgattgatgaacgaaagtatatagtacactcctatctaaaaaattataaaaatttcgattatccatttttcaggaagttagttttgactaataaacattgtctcaacaattattataatataagcgacagcaaatatggaacaccgctacatatattggcgtctaataaaaaattaataactcctaattacatgaagttattagtgtataacggaaatgatataaacgcacgaggtgaagatacacaaatgcgaactccattacacaaatatttgtgtaaatttgtatatcataatattgaatatggtatccgatactataatgaaaagattatagacgcatttatagagttaggagccgatctaactattccaaatgacgatggaatgataccagtagtttactgtatacactcaaatgccgaatatggttataacaatattactaacataaagataatacgtaaactacttaatcttagtagacgtgcgtcacataatctatttagagatcgagtcatgcacgattatataagtaatacatatattgatcttgagtgtttagatattattagatcgttggatggattcgatatcaatggttactttgaaggacgtacaccacttcattgcgctatacaacataacttcactcagattgctaagtacttattagatcgaggagctgatatagtcgtacccaacacattgattatacatcagtacatacagtaaatagcatagatatggaggaggatacaaatatttcaaataaagttatgagatacgacactgtcaataatatatgggaaacattacctaacttctggactggaactataaatccaggcgtggtctcgcataaagatgatatatatgttgtatgcgacatcaaagatgaaaaaaatgttaaaacttgtatatttagatataacacgaatacgtataacggatgggaattggtcacgacgacagaaagcagattatcagctctgcatactattctttataacaataccataatgatgttacattgttatgaatcgtatatgttacaagatacatttaatgtgtacactcgcgaatggaatcatatgtgtcatcaacattcgaatagttatatcatgtacaatatactacccatctactaaatataatagaataaaataaatgagtatgatcattttagataacgattgattttatcattaccgcttcattcttatattctttgcttacggaacctatatttagaaacatctactaacgattttttatgcttgcattattaatggtatgtaatatgattgattgtgtacgcaataccaatttgttaagtatgaatacggggtacaaacataaactgaagtttaacattatttatttatgatatatatcgttattgtttggtctataccatggatatctttaaagaactaatcttaaaacacacggatgaaaatgttttgatttctccagtttctattttatctactttatctattctaaatcatggagcagctggttctacagctgaacaactatcaaaatatatagagaatatgaatgagaatacacccgatgacaataatgacatggacgtagatattccgtattgtgcgacactagctaccgcaaataaaatatacggtagcgatagtatcgagttccacgcctccttcctacaaaaaataaaagacgattttcaaactgtaaactttaataatgctaaccaaacaaaggaactaatcaacgaatgggttaagacaatgacaaatggtaaaattaattccttattgactagtccgctatccattaatactcgtatgacagttgttagcgccgtccattttaaagcaatgtggaaatatccattttctaaacatcttacatatacagacaagttttatatttctaagaatatagttaccagcgttgatatgatggtgggtaccgagaataacttgcaatatgtacatattaatgaattattcggaggattctctattatcgatattccatacgagggaaactctagtatggtgattatactaccggacgacatagaaggtatatataacatagaaaaaaatataacagatgaaaaatttaaaaaatggtgtggtatgttatctactaaaagtatagacttgtatatgccaaagtttaaagtggaaatgacagaaccgtataatctggtaccgattttagaaaatttaggacttactaatatattcggatattatgcagattttagcaagatgtgtaatgaaactatcactgtagaaaaatttctacatacgacgtttatagatgttaatgaggagtatacagaagcatcggccgttacaggagtatttatgactaacttttcgatggtatatcgtacgaaggtctacataaaccatccattcatgtacatgattaaagacaccacaggacgtatactttttatagggaaatactgctatccgcaataaatataaacaaatagacttttatcacgtttatctatgtctaaatattacaaatagtaatagtataaactaaagctgataatacttaaaaaaataataatatcatttacaattaatagtataaactaaaaattaaacaaatcgttattataagtaatatcaaaatgatgatatacggattaatagcgtgtcttatattcgtgacttcatccatcgctagtccactttatattcccgttattccacccattacggaagataaatcgttcaatagtgtagaggtattagtttccttgtttagagatgaccaaaaagactatacggtaacttctcagttcaataactacactatcgataccaaagactggactatcggcgtactatccacacctgatggtttggatataccattgactaatataacttattggtcacggtttactataggtcgtgcattgttcaaatcagagtctgaggatattttccaaaagaaaatgagtattctaggtgtttctatagaatgtaagaagtcgtcgacattacttacttttttgaccgtgcgtaaaatgactcgagtatttaataaatttccagatatggcttattatcgaggagactgtttaaaagccgtttatgtaacaatgacttataaaaatactaaaactggagagactgattacacgtacctctctaatggggggttgcctgcatactatcgtaatggggtcgatggttgattattgattagtatattccttattcacacaaaaagaacatttttataaacatgaaaccactgtctaaatgtaattatgatcttgatttatagatgaagatcagcctttagaggattttaaccagtatgtttaatatgaaaaaaataaacataacatattttgagattaagcgctattgtgcttaattattttgctctataaactgaatatatagccacaattattgacgggcttgtttatgaccggcaatcatgaatttacagaaattatctctggctatatatcttactgcgacatgttcgtggtgttatgaaacatgcataagaaaaactgcgttgtatcatgacattcaattggagcatgtagaagacaataaagatagtgtagcgtcgctaccgtacaagtagtcaatcaaagagaacgtagtagattgttggctacatttaattggacagatatagctgagggtgttagaaatgagttcattaaaatatgtgatatcaacggaacatatttatataattatactattgctgttagtataattattgattccacggaagaactaccaacagttactccaattacaacaacatatgaaccttctacatataattatactatcgatgatagcactgttattactactgaagaactacaagtgactcctcatatggatctccatcgatgatacatgtattaaaatactttccgaataagtcttttaaatattgtattaattatgaaaaactatgctatgcgagtatgatgcaaagatgtttaatgatacgatactagattttatctctagcgagagatgtcgttagaatcatttatcataactacgtttaataataattcatcaacgaatatcgataacatgtgtcatttatacgttaaagtctgtccgtcttctctattgtttagactgtttgtagaatgctgtgatataaacaaactagtagaaggtacgactccgttacactgttatctaatgaatgaaggatttgaatcatctgttttaaaaaacctattaaaggagtatgtcatgaatacgtttaatgttcatgacatccattacacaaatatttaactcatgatgaagttgagaatgatatgctttctgatagtatagatagctttagctaatataaaaatatattaatccactatatattctagacttgatttaaaaccgataaactactacgtactgtataagttgttaagaaaaggagcagaccctaattatgcagatgatagaggtaatacttttcttcattacttctgcatctatatgtccacttatgagaaaacgtcatttaataagatgcatcgtgaaaagaaatttattaaagagttggtaaaatatgaaaccgaaagtaaataatataggaaatacacctctacataactacgtatctcaatatgatatcactctcattcctcatccacaacccattaaaaaaatggaaattaaagccctctattagcataaacggctacaggtctacctttacaatggcctttccttgtgcccagttcagaccctgtcattgccacgctactaaggactccctgaataccgtggccgacgtcagacattgtctgactgaatacatcctgtgggtttctcatagatggacccatagagaaactgcagggcctctctacaggcttctcatctctttcagaactgatgcaacggagctctttggtggtgagttgaaggattcacttccgtgggacaatatcgacaattgcgtggagatcattaaatgtttcatcagaaatgactccatgaaaaccgccgaagaacttcgtgcaatcattggactttgtactcaatcagctatcgtctctggaagagtcttcaacgataagtatatcgacatactacttatgctgcgaaagattctgaacgagaacgactatctcaccctcttggatcatatccgcactgctaaatactaaatctccttcatgctctctcactacactttttatcatcttatgaggaatgattgccttcatcatttttcgtgaaataggaataattagcaccagaatagctatggattgcacatgtattctatgtcgtctactggatgaagatgtgacgtacaaaaaaataaaactagaaattgaaacgtgtcacaacttatcaaaacatatagatagacgaagaaacaatgcgctacattgttacgtctccaataaatgcgatacagacattaagattgttcgactgttactctctcgcggagtcgagagacttcgtagaaacaacgaaggattaactccgctaggagtatacagtaagcatagatacgtcaaatctcaaattgtgcatctactgatatccagctattcgaattcctctaacgaactcaagtcgaatataaatgatttcgatctgtattcggataatatcgacttacgtctgctaaaatacctaattgtggataaacggatacgtccgtccaagaatacgaattatgcaatcaatagtctcggattggtggatatatacgtaacgacgcctaatccgagaccagaagtattgctatggcttcttaaatcagaatgttacagcaccggttacgtatttcgtacctgtatgtacaacagtgatatgtgtaagaactctcttcattactatatatcgtctcatagagaatctcaatctctatccaaggatgtaattaaatgtttgatcaataacaatgtttccatccatggcagagacgaaggaggatctttacccatccaatactactggtctttctcaaccatagatatagagattgttaaattattattaataaaggatgtggacacgtgtagagtatacgacgtcagccctatattagaggcgtattatctaaacaagcgatttagagtaaccccatataatgtagacatggaaatcgttaatcttcttattgagagacgtcatactcttgtcgacgtaatgcgtagtattacttcgtacgattccagagaatataaccactacatcatcgataacattctaaagagatttagacaacaggatgaatccatcgtacaagccatgttgataaactacttacattacggcgatatggtcgttcgatgcatgttagataacggacaacaactatcctctgcacgactactttgttaataataatctcgtcgatgtaaacgtcgtaaggtttatcgtggaaaatatggacacgcggctgtaaatcacatatctaacaatggccgtctatgtatgtacggtctgatattatcgagatttaataattgcgggtatcactgttatgaaaccatactaatagatgtatttgatatactaagcaagtacatggataatatagatatgatcgataatgagaataaaactctactatattacgcggtcgatgtcaataatatacaatttgcaaagcggttattggaatatggagcgagtgttacaacatcacgctcgataatcaatacggccatccagaaaagtagttacagaagagaaaacaaaacgaagctagttgatttattacttagctaccatcccactctagagactatgattgacgcatttaatagagatatacgctatctatatcctgaaccattatcggcatgtatcagatacgccttaatcatagatgatgattttccttctaaagtaagtatgatatcgccggtcatcataaggaactaaagcgctatagagtagacattaatagaatgaagaatgcctacatatcaggcgtctccatgtttgatatattatttaaacgaagcaaacgccacagattgagatacgcaaagaatccgacatcaaatggtacaaaaaagaactaacgtccatcattacagatactgtaaagaacagtgagaggatcgactccatagtggacaacattaatacagacgataacttgatttcgaaattacccatggagatactttattactccattaaataatttatcatggagcgataatgtcctgtttcatttgtttccatgacatattacaaaatcgattccgtccaagatgataaaaacatttaccggcatcataaacacggagtttattttatatgtctcgcataaacattactaaaaaaatatattgttcggttttctttcacatctttaattatgaaaaagtaaatcattatgagatggacgagattgtgagcatcgttcgcgacagtatgtggtacatacctaacgtatttatggacgacggtaagaatgaaggtcacgtttctgtcaacaatgtctgtcatatgtatttcacgttctttgatgtggatacatcgtctcatctgtttaagctagttattaaacactgcgatctgaataaacgaggtaactctccattacattgctatacgatgaatacacgatttaatccatctgtattaaagatattgttacaccacggcatgcgtaactttgatagcaaggatgaccactatcaatcgataacaagatctttgatatactaacggacaccattgatgactttagtaaatcatccgatctattgctgtgttatcttagatataaattcaatgggagcttaaactattacgttctgtacaaaggatccgaccctaattgcgccgacgaggatgaactcacttctcttcattactactgtaaacacatatccacgttctacaaaagcaattattacaagtcaagtcacactaagatgcgagccgagaagcgattcatctacgcgataatagattatggagcaaacattaacgcggttacacacttaccttcaacagtataccaaacatagtcctcgtgtggtgtatgctcttttatctcgaggatacgtaataatcttgattgtacacccatcatggaacgattgtgcaacaggtcatattctcataatgttactcaattggcacgaacaaaaggaagaaggacaacatctactttatctattcataaaacataatcaaggatacactctcaatatactacggtatctactagataggttcgacattcagaaagacgaatactataataccgcctttcaaaattgtaacaacaatgttgcctcatacatcggatacgacatcaaccttccgactaaagacggtattcgacttggtgtttgaaaacagaaacatcatatacaaggcggatgttgtgaatgacatcatccaccacagactgaaagtacctatgattaaatcgttgttctacaagatgtcagaattctctccctacgacgattactacgtaaaaaagatactagcctactgcctattaagggacgagtcattcgcggaactacatagtaaattctgtttaaacgaggactataaaagtgtatttatgaaaaatatatcattcgataagatagattccatcatcgtgacataagtcgccttaaagagattcgaatctccgacaccgacctgtatacggtatcacagctatcttaaagccatacattcagacagtcacatttcatttcccatgtacgacgatctcatagaacagtgccatctatcgatggagcgtaaaagtaaactcgtcgacaaagcactcaataaattagagtctaccatcgatggccaatctagactatcgtatttgcctccggaaattatgcgcaatatcatctaaacagtatgttgtacggaaagaaccattacaaatattatccatgatagaaagaaaatatctatatgattggagaagtaggaaacaggaacaagacgacgattactacattattaaatcatgaagtccgtattatactcgtatatattgtttctctcatgtataataataaacggaagagatatagcaccgcatgcaccatccgatggaaagtgtaaagacaacgaatacaaacgccataatttgtgtccgggaacatacgcttccagattatgcgaacacacaatgtacgccgtgtggttcgggtaccttcacatctcgcaataatcatttacccgcttgtctaagttgtaacggaagatgcgatcgtgtaacactactcacaatagaatctgtgaatgctctcccggatattattgtcttctcaaaggatcatccggatgcaaggcatgtgtttcccaaacaaaatgtggaataggatacggagtatccggagacgtcatctgttctccgtgtggtctcggaacatattctcacaccgtctcttccgcagataaatgcgaacccgtacccagaaatacctttaactatatcgatgtggaaattaatctgtatcccgtcaacgacacgtcgtgtactcggacgaccactaccggtctcagtgaatccatctcaacgtcggaactaactattactatgaatcataaagactgtaatcccgtatttcgtgatggatacttctctgtccttaataaggtagcaacttcaggtttctttacaggagaaaggtgtgcactctgaatttcgagattaaatgcaataacaaagattcttcctccaaacagttaacgaaagcaaagaatgatactatcatgccgcattcggagacagtaactctagcgtcgacatctatatactatatagtaataccaatactcaagactacgaaactgatacaatctcttatcatgtgggtaatgtagccatatgcccggtagttgcgatatacataaactgatcactaattccaaacccacccgctttttatagtaagtttttcacccataaatacaataattaatttctcgtaaaagtagaaaatatattctaatttattgcacggtaaggaagtagaatcataaagaacagtactcaatcaatagcaatcatgaaacaatatatcgtactggcatgcatgtgcctgccagtcttcagcaatcatcctcatcgtgtacggaagaagaaaacaaacatcatatgggaatcgatgttattatcaaagtcacaaagcaagaccaaacaccgaccgatgataagatttgccaatccgtaacggaaattacagagtccgagtcagatccagatcccgaggtggaatcagtcgaggatgtagatcctcctaccacttattactccatcatcggtggaggtctgagaatgaactttggattcaccaaatgtcctcagattaaatccatctcagaatccgctgatggaaagactgtgaggtgtctatcgacatcagatgtagcgaagaagagaaagacagcgacatcaagacccatccagtactcgggtctaacatctctcataagaaagtgagttacgaagatatcatcggttcaacgatcgtcgatacaaaatgcgtcaagaatctagagtttagcgttcgtatcggagacatgtgcaaggaatcatctgaacttgaggtcaaggatggattcaagtatgtcgacggatcggcatctgaaggtgcaaccgatgatacttcactcatcgattcaacaaaactcaaagcgtgtgtctgaatcgataactctattcatctgaaattggatgagtagggttaatcgaacgattcaggcacaccacgaattaaaaaagtgtaccggacactatattccggtttgcaaaacaaaaatgttcttaactacattcacaaaaagttacctctcgcgacttcttctttttctgtctcaatagtgtgatacgattatgacactattcctattcctattcctatttcctttcagggtatcacaaaaatattaaacctctttctgatggtctcataaaaaaagttttacaaaaatatttttattctctttctctctttgatggtctcataaaaaaagttttacaaaaatatttttattctctttctctctttgatggtctcataaaaaa

SEQ ID NO: 11 - protein, 168 aa, synthetic construct
MKSLNRQTVSRFKKLSVPVAIMMILSTIISGIGTFLHYKEELMPSACANGWIQYDKHCYLDTNIKMSTDNAVYQCRKLRARLPRPDTRHLRVLFSIFYKDYWVSLKKTNNKWLDINNDKDIDISKLTNFKQLNSTTDAEACYIYKSGKLVETVCKSTQSVLCVKKFYK

SEQ ID NO: 12 - protein, 268 aa, unidentified
MSAWYKEPNSIILLAAKSDVLYFDNYTKDKISYDSPYDDLVTTITIKSLTARDAGTYVCAFFMTSPTNDTDKVDYEEYSTELIVNTDSESTIDIILSGSTHSPETSSEKPEDIDNFNCSSVFEIATPEPITDNVEDHTDTVTYTSDSINTVSATSGESTTDETPEPITDKEDHTVTDTVSYTTVSTSSGIVTTKSTTDDADLYDTYNDTVPSTTVGSSTTSISNYKTKDFVEIFGITALIILSAVAIFCITYYICNKRSRKYKTENKV
